United States Patent Application Publication US 2007/0031850 A1 - sequence listing, part 9

SEQ ID NO: 262275 - DNA, 25 bp, Probe sequence
gaagttcattcaggtcatgcaaaac

SEQ ID NO: 262276 - DNA, 25 bp, Probe sequence
gattcaagttttactgcctggaaat

SEQ ID NO: 262277 - DNA, 25 bp, Probe sequence
gttggtggtgtaatacagaataata

SEQ ID NO: 262278 - DNA, 25 bp, Probe sequence
gttcattcaggtcatgcaaaacaaa

SEQ ID NO: 262279 - DNA, 25 bp, Probe sequence
gtattaagattcaagttttactgcc

SEQ ID NO: 262280 - DNA, 25 bp, Probe sequence
gtcagtgcaccaatattaaatattt

SEQ ID NO: 262281 - DNA, 25 bp, Probe sequence
gggggaagtcatagaaagcaaacaa

SEQ ID NO: 262282 - DNA, 25 bp, Probe sequence
ggagttgtcagtgcaccaatattaa

SEQ ID NO: 262283 - DNA, 25 bp, Probe sequence
taacaacagaagttcattcaggtca

SEQ ID NO: 262284 - DNA, 25 bp, Probe sequence
tacactggaaagactatggaaatga

SEQ ID NO: 262285 - DNA, 25 bp, Probe sequence
tagctttaggaattttaacaacagg

SEQ ID NO: 262286 - DNA, 25 bp, Probe sequence
tttactgcctggaaatgataaaagt

SEQ ID NO: 262287 - DNA, 25 bp, Probe sequence
ttagcttgaaagatggcagttttta

SEQ ID NO: 262288 - DNA, 25 bp, Probe sequence
ttcaagttttactgcctggaaatga

SEQ ID NO: 262289 - DNA, 25 bp, Probe sequence
atttttgtaacatcttgcggtggtg

SEQ ID NO: 262290 - DNA, 25 bp, Probe sequence
ataattctaaaacagagagatgtga

SEQ ID NO: 262291 - DNA, 25 bp, Probe sequence
agatgtgaaaagatgggatatttaa

SEQ ID NO: 262292 - DNA, 25 bp, Probe sequence
agagatgtgaaaagatgggatattt

SEQ ID NO: 262293 - DNA, 25 bp, Probe sequence
agagagatgtgaaaagatgggatat

SEQ ID NO: 262294 - DNA, 25 bp, Probe sequence
actggagattcaaaagaaacacaaa

SEQ ID NO: 262295 - DNA, 25 bp, Probe sequence
aataattctaaaacagagagatgtg

SEQ ID NO: 262296 - DNA, 25 bp, Probe sequence
aattctaaaacagagagatgtgaaa

SEQ ID NO: 262297 - DNA, 25 bp, Probe sequence
cagagagatgtgaaaagatgggata

SEQ ID NO: 262298 - DNA, 25 bp, Probe sequence
ctggagattcaaaagaaacacaaat

SEQ ID NO: 262299 - DNA, 25 bp, Probe sequence
gctaaagtttattaggtgtagaaat

SEQ ID NO: 262300 - DNA, 25 bp, Probe sequence
gaaataattctaaaacagagagatg

SEQ ID NO: 262301 - DNA, 25 bp, Probe sequence
gagagatgtgaaaagatgggatatt

SEQ ID NO: 262302 - DNA, 25 bp, Probe sequence
gagatgtgaaaagatgggatattta

SEQ ID NO: 262303 - DNA, 25 bp, Probe sequence
gatgtgaaaagatgggatatttaaa

SEQ ID NO: 262304 - DNA, 25 bp, Probe sequence
gtaacatcttgcggtggtggtaata

SEQ ID NO: 262305 - DNA, 25 bp, Probe sequence
tggagattcaaaagaaacacaaatc

SEQ ID NO: 262306 - DNA, 25 bp, Probe sequence
tgtaacatcttgcggtggtggtaat

SEQ ID NO: 262307 - DNA, 25 bp, Probe sequence
taattctaaaacagagagatgtgaa

SEQ ID NO: 262308 - DNA, 25 bp, Probe sequence
taacatcttgcggtggtggtaataa

SEQ ID NO: 262309 - DNA, 25 bp, Probe sequence
tttgtaacatcttgcggtggtggta

SEQ ID NO: 262310 - DNA, 25 bp, Probe sequence
ttttgtaacatcttgcggtggtggt

SEQ ID NO: 262311 - DNA, 25 bp, Probe sequence
tttttgtaacatcttgcggtggtgg

SEQ ID NO: 262312 - DNA, 25 bp, Probe sequence
ttgtaacatcttgcggtggtggtaa

SEQ ID NO: 262313 - DNA, 25 bp, Probe sequence
ataaatcagacgaattggatgatga

SEQ ID NO: 262314 - DNA, 25 bp, Probe sequence
aggcaataaatcagacgaattggat

SEQ ID NO: 262315 - DNA, 25 bp, Probe sequence
agggcgacaaaggaatgtggactat

SEQ ID NO: 262316 - DNA, 25 bp, Probe sequence
actatatatacagattttgctaaag

SEQ ID NO: 262317 - DNA, 25 bp, Probe sequence
acaaaggaatgtggactatatatac

SEQ ID NO: 262318 - DNA, 25 bp, Probe sequence
aaaggaatgtggactatatatacag

SEQ ID NO: 262319 - DNA, 25 bp, Probe sequence
aaaggcaataaatcagacgaattgg

SEQ ID NO: 262320 - DNA, 25 bp, Probe sequence
aaagggcgacaaaggaatgtggact

SEQ ID NO: 262321 - DNA, 25 bp, Probe sequence
aaggcaataaatcagacgaattgga

SEQ ID NO: 262322 - DNA, 25 bp, Probe sequence
aagggcgacaaaggaatgtggacta

SEQ ID NO: 262323 - DNA, 25 bp, Probe sequence
aaggaatgtggactatatatacaga

SEQ ID NO: 262324 - DNA, 25 bp, Probe sequence
aataaatcagacgaattggatgatg

SEQ ID NO: 262325 - DNA, 25 bp, Probe sequence
caataaatcagacgaattggatgat

SEQ ID NO: 262326 - DNA, 25 bp, Probe sequence
caaaggaatgtggactatatataca

SEQ ID NO: 262327 - DNA, 25 bp, Probe sequence
ctatatatacagattttgctaaagg

SEQ ID NO: 262328 - DNA, 25 bp, Probe sequence
ctaaaggcaataaatcagacgaatt

SEQ ID NO: 262329 - DNA, 25 bp, Probe sequence
cgacaaaggaatgtggactatatat

SEQ ID NO: 262330 - DNA, 25 bp, Probe sequence
gcgacaaaggaatgtggactatata

SEQ ID NO: 262331 - DNA, 25 bp, Probe sequence
gctaaaggcaataaatcagacgaat

SEQ ID NO: 262332 - DNA, 25 bp, Probe sequence
gcaataaatcagacgaattggatga

SEQ ID NO: 262333 - DNA, 25 bp, Probe sequence
gacaaaggaatgtggactatatata

SEQ ID NO: 262334 - DNA, 25 bp, Probe sequence
gactatatatacagattttgctaaa

SEQ ID NO: 262335 - DNA, 25 bp, Probe sequence
gggcgacaaaggaatgtggactata

SEQ ID NO: 262336 - DNA, 25 bp, Probe sequence
gtggactatatatacagattttgct

SEQ ID NO: 262337 - DNA, 25 bp, Probe sequence
ggactatatatacagattttgctaa

SEQ ID NO: 262338 - DNA, 25 bp, Probe sequence
ggcaataaatcagacgaattggatg

SEQ ID NO: 262339 - DNA, 25 bp, Probe sequence
ggcgacaaaggaatgtggactatat

SEQ ID NO: 262340 - DNA, 25 bp, Probe sequence
tggactatatatacagattttgcta

SEQ ID NO: 262341 - DNA, 25 bp, Probe sequence
tgtggactatatatacagattttgc

SEQ ID NO: 262342 - DNA, 25 bp, Probe sequence
tgctaaaggcaataaatcagacgaa

SEQ ID NO: 262343 - DNA, 25 bp, Probe sequence
taaaggcaataaatcagacgaattg

SEQ ID NO: 262344 - DNA, 25 bp, Probe sequence
taaatcagacgaattggatgatgaa

SEQ ID NO: 262345 - DNA, 25 bp, Probe sequence
tatatatacagattttgctaaaggc

SEQ ID NO: 262346 - DNA, 25 bp, Probe sequence
attcctcagttggtcaaaacgatat

SEQ ID NO: 262347 - DNA, 25 bp, Probe sequence
atcctgaagcaccaatttattcggc

SEQ ID NO: 262348 - DNA, 25 bp, Probe sequence
atggtgagttttcatataatcctga

SEQ ID NO: 262349 - DNA, 25 bp, Probe sequence
aaattcctcagttggtcaaaacgat

SEQ ID NO: 262350 - DNA, 25 bp, Probe sequence
aaagatatgacatttcaacaaaaga

SEQ ID NO: 262351 - DNA, 25 bp, Probe sequence
aagcaccaatttattcggctaaata

SEQ ID NO: 262352 - DNA, 25 bp, Probe sequence
aaggtacttggctaattagatccga

SEQ ID NO: 262353 - DNA, 25 bp, Probe sequence
aagaggtatgcaattatatattaat

SEQ ID NO: 262354 - DNA, 25 bp, Probe sequence
aatacaacaatggtgagttttcata

SEQ ID NO: 262355 - DNA, 25 bp, Probe sequence
aatagaaataccgaaacagccaaag

SEQ ID NO: 262356 - DNA, 25 bp, Probe sequence
cagccaaagggcaaagtgatgaaaa

SEQ ID NO: 262357 - DNA, 25 bp, Probe sequence
catataatcctgaagcaccaattta

SEQ ID NO: 262358 - DNA, 25 bp, Probe sequence
cctgaagcaccaatttattcggcta

SEQ ID NO: 262359 - DNA, 25 bp, Probe sequence
gaaatagttaaacagccaaagggca

SEQ ID NO: 262360 - DNA, 25 bp, Probe sequence
gaaataaaattattcctactgaaca

SEQ ID NO: 262361 - DNA, 25 bp, Probe sequence
gacatttcaacaaaagaaacaccga

SEQ ID NO: 262362 - DNA, 25 bp, Probe sequence
gatagtgttgaattcataccaagta

SEQ ID NO: 262363 - DNA, 25 bp, Probe sequence
gattacaatgtaaggcaactacgta

SEQ ID NO: 262364 - DNA, 25 bp, Probe sequence
gttacttttgaaaggtggaggagat

SEQ ID NO: 262365 - DNA, 25 bp, Probe sequence
gttttcatataatcctgaagcacca

SEQ ID NO: 262366 - DNA, 25 bp, Probe sequence
gtaaggcaactacgtaaaagatatg

SEQ ID NO: 262367 - DNA, 25 bp, Probe sequence
gtgttgaattcataccaagtaagta

SEQ ID NO: 262368 - DNA, 25 bp, Probe sequence
ggtacttggctaattagatccgaaa

SEQ ID NO: 262369 - DNA, 25 bp, Probe sequence
ggagatttaaaaaattcctcagttg

SEQ ID NO: 262370 - DNA, 25 bp, Probe sequence
tgaaaacaagaggtatgcaattata

SEQ ID NO: 262371 - DNA, 25 bp, Probe sequence
tgaagcaccaatttattcggctaaa

SEQ ID NO: 262372 - DNA, 25 bp, Probe sequence
tcctcagttggtcaaaacgatattg

SEQ ID NO: 262373 - DNA, 25 bp, Probe sequence
tcaaaacgatattgaatttactttt

SEQ ID NO: 262374 - DNA, 25 bp, Probe sequence
tcaattacacaacgatgattacaat

SEQ ID NO: 262375 - DNA, 25 bp, Probe sequence
taatcctgaagcaccaatttattcg

SEQ ID NO: 262376 - DNA, 25 bp, Probe sequence
taacgatagtgttgaattcatacca

SEQ ID NO: 262377 - DNA, 25 bp, Probe sequence
tacttggctaattagatccgaaata

SEQ ID NO: 262378 - DNA, 25 bp, Probe sequence
tagatccgaaatagttaaacagcca

SEQ ID NO: 262379 - DNA, 25 bp, Probe sequence
ttcctactgaacaaattaatgacga

SEQ ID NO: 262380 - DNA, 25 bp, Probe sequence
attcctactgataaagcaccggtat

SEQ ID NO: 262381 - DNA, 25 bp, Probe sequence
atattcctactgataaagcaccggt

SEQ ID NO: 262382 - DNA, 25 bp, Probe sequence
atatgtatccaattaagaatctcga

SEQ ID NO: 262383 - DNA, 25 bp, Probe sequence
ataaatcaagcgatacttcagaaaa

SEQ ID NO: 262384 - DNA, 25 bp, Probe sequence
atcaagcgatacttcagaaaagcca

SEQ ID NO: 262385 - DNA, 25 bp, Probe sequence
atgagaatgttccaagttatgacgc

SEQ ID NO: 262386 - DNA, 25 bp, Probe sequence
atgttccaagttatgacgcaaaatt

SEQ ID NO: 262387 - DNA, 25 bp, Probe sequence
atgtatccaattaagaatctcgagg

SEQ ID NO: 262388 - DNA, 25 bp, Probe sequence
agtcgttataatattcctactgata

SEQ ID NO: 262389 - DNA, 25 bp, Probe sequence
agaagtcgttataatattcctactg

SEQ ID NO: 262390 - DNA, 25 bp, Probe sequence
aaagcaccggtattaaaaatgcata

SEQ ID NO: 262391 - DNA, 25 bp, Probe sequence
aagcgatttgtcagtaatagattct

SEQ ID NO: 262392 - DNA, 25 bp, Probe sequence
aaggtgaaaaaagcgatttgtcagt

SEQ ID NO: 262393 - DNA, 25 bp, Probe sequence
aagggacattattttgttaagacat

SEQ ID NO: 262394 - DNA, 25 bp, Probe sequence
aatattcctactgataaagcaccgg

SEQ ID NO: 262395 - DNA, 25 bp, Probe sequence
caatggtgatgtctcaattaatgag

SEQ ID NO: 262396 - DNA, 25 bp, Probe sequence
caagcgatacttcagaaaagccaaa

SEQ ID NO: 262397 - DNA, 25 bp, Probe sequence
caccggtattaaaaatgcatattga

SEQ ID NO: 262398 - DNA, 25 bp, Probe sequence
gcgatacttcagaaaagccaaaaga

SEQ ID NO: 262399 - DNA, 25 bp, Probe sequence
gcgatttgtcagtaatagattcttt

SEQ ID NO: 262400 - DNA, 25 bp, Probe sequence
gaatgttccaagttatgacgcaaaa

SEQ ID NO: 262401 - DNA, 25 bp, Probe sequence
gaaggtatggtcttatacttagata

SEQ ID NO: 262402 - DNA, 25 bp, Probe sequence
gaagtcgttataatattcctactga

SEQ ID NO: 262403 - DNA, 25 bp, Probe sequence
gagaatgttccaagttatgacgcaa

SEQ ID NO: 262404 - DNA, 25 bp, Probe sequence
gttccaagttatgacgcaaaattta

SEQ ID NO: 262405 - DNA, 25 bp, Probe sequence
gttaagcaattaagaagtcgttata

SEQ ID NO: 262406 - DNA, 25 bp, Probe sequence
ggtatggtcttatacttagatagaa

SEQ ID NO: 262407 - DNA, 25 bp, Probe sequence
tcctactgataaagcaccggtatta

SEQ ID NO: 262408 - DNA, 25 bp, Probe sequence
ggattgagtaatgaaggtatggtct

SEQ ID NO: 262409 - DNA, 25 bp, Probe sequence
tactgataaagcaccggtattaaaa

SEQ ID NO: 262410 - DNA, 25 bp, Probe sequence
tatacttagatagaaatacacggac

SEQ ID NO: 262411 - DNA, 25 bp, Probe sequence
tattcctactgataaagcaccggta

SEQ ID NO: 262412 - DNA, 25 bp, Probe sequence
ttggaaattgacttttcaaaaggtg

SEQ ID NO: 262413 - DNA, 25 bp, Probe sequence
ttgaaaggaagttctgtgggttata

SEQ ID NO: 262414 - DNA, 25 bp, Probe sequence
atccaattacaactaataactctcc

SEQ ID NO: 262415 - DNA, 25 bp, Probe sequence
actaataactctccaaatctaaaat

SEQ ID NO: 262416 - DNA, 25 bp, Probe sequence
actaatgaaaacgtaccgagctatg

SEQ ID NO: 262417 - DNA, 25 bp, Probe sequence
aaaggtacgtggactatacttacag

SEQ ID NO: 262418 - DNA, 25 bp, Probe sequence
aacgtaccgagctatgaagcacaat

SEQ ID NO: 262419 - DNA, 25 bp, Probe sequence
aagataaaggtcaagagacaacatt

SEQ ID NO: 262420 - DNA, 25 bp, Probe sequence
aaggcgataaaggtacgtggactat

SEQ ID NO: 262421 - DNA, 25 bp, Probe sequence
aaggaagctcagtaggatataaaaa

SEQ ID NO: 262422 - DNA, 25 bp, Probe sequence
aattacaactaataactctccaaat

SEQ ID NO: 262423 - DNA, 25 bp, Probe sequence
caactaataactctccaaatctaaa

SEQ ID NO: 262424 - DNA, 25 bp, Probe sequence
ccgagctatgaagcacaatataaaa

SEQ ID NO: 262425 - DNA, 25 bp, Probe sequence
ccaggagtattagatgatgaaggca

SEQ ID NO: 262426 - DNA, 25 bp, Probe sequence
gaattttggaccgtctgaaggtgag

SEQ ID NO: 262427 - DNA, 25 bp, Probe sequence
gagatggtgagtttaaaaaaggcga

SEQ ID NO: 262428 - DNA, 25 bp, Probe sequence
gaaggcatggtgttatatcttaata

SEQ ID NO: 262429 - DNA, 25 bp, Probe sequence
gaaaacgtaccgagctatgaagcac

SEQ ID NO: 262430 - DNA, 25 bp, Probe sequence
gatgaaggcatggtgttatatctta

SEQ ID NO: 262431 - DNA, 25 bp, Probe sequence
gatataaaaggaagctcagtaggat

SEQ ID NO: 262432 - DNA, 25 bp, Probe sequence
gattatttgaattttggaccgtctg

SEQ ID NO: 262433 - DNA, 25 bp, Probe sequence
gtaccgagctatgaagcacaatata

SEQ ID NO: 262434 - DNA, 25 bp, Probe sequence
gtaacaaaccaggagtattagatga

SEQ ID NO: 262435 - DNA, 25 bp, Probe sequence
gtctgaaggtgagaatgttgagtag

SEQ ID NO: 262436 - DNA, 25 bp, Probe sequence
ggtacgtggactatacttacaggtt

SEQ ID NO: 262437 - DNA, 25 bp, Probe sequence
gtggactatacttacaggtttttca

SEQ ID NO: 262438 - DNA, 25 bp, Probe sequence
ggatatcgagatggtgagtttaaaa

SEQ ID NO: 262439 - DNA, 25 bp, Probe sequence
ggaccgtctgaaggtgagaatgttg

SEQ ID NO: 262440 - DNA, 25 bp, Probe sequence
ggcgataaaggtacgtggactatac

SEQ ID NO: 262441 - DNA, 25 bp, Probe sequence
ggcatggtgttatatcttaatagaa

SEQ ID NO: 262442 - DNA, 25 bp, Probe sequence
tggactatacttacaggtttttcaa

SEQ ID NO: 262443 - DNA, 25 bp, Probe sequence
taactctccaaatctaaaattatat

SEQ ID NO: 262444 - DNA, 25 bp, Probe sequence
tacaactaataactctccaaatcta

SEQ ID NO: 262445 - DNA, 25 bp, Probe sequence
tacgtggactatacttacaggtttt

SEQ ID NO: 262446 - DNA, 25 bp, Probe sequence
tatttgaattttggaccgtctgaag

SEQ ID NO: 262447 - DNA, 25 bp, Probe sequence
ttttggaccgtctgaaggtgagaat

SEQ ID NO: 262448 - DNA, 25 bp, Probe sequence
attcctactgataaagcaccggtat

SEQ ID NO: 262449 - DNA, 25 bp, Probe sequence
atattcctactgataaagcaccggt

SEQ ID NO: 262450 - DNA, 25 bp, Probe sequence
atatgtatccaattaagaatctcga

SEQ ID NO: 262451 - DNA, 25 bp, Probe sequence
atgcatattgatggtaatttgaaag

SEQ ID NO: 262452 - DNA, 25 bp, Probe sequence
atgagaatgttccaagttatgacgc

SEQ ID NO: 262453 - DNA, 25 bp, Probe sequence
atgttccaagttatgacgcaaaatt

SEQ ID NO: 262454 - DNA, 25 bp, Probe sequence
atgtatccaattaagaatctcgagg

SEQ ID NO: 262455 - DNA, 25 bp, Probe sequence
agggacattattttgttaagacatt

SEQ ID NO: 262456 - DNA, 25 bp, Probe sequence
agtcgttataatattcctactgata

SEQ ID NO: 262457 - DNA, 25 bp, Probe sequence
agaagtcgttataatattcctactg

SEQ ID NO: 262458 - DNA, 25 bp, Probe sequence
aaagcaccggtattaaaaatgcata

SEQ ID NO: 262459 - DNA, 25 bp, Probe sequence
aaagcgatttgtcagtaatagattc

SEQ ID NO: 262460 - DNA, 25 bp, Probe sequence
aacaatggtgatgtctcaattaatg

SEQ ID NO: 262461 - DNA, 25 bp, Probe sequence
aatatgcaaaccttaaagaattgaa

SEQ ID NO: 262462 - DNA, 25 bp, Probe sequence
aatattcctactgataaagcaccgg

SEQ ID NO: 262463 - DNA, 25 bp, Probe sequence
caatggtgatgtctcaattaatgag

SEQ ID NO: 262464 - DNA, 25 bp, Probe sequence
caccggtattaaaaatgcatattga

SEQ ID NO: 262465 - DNA, 25 bp, Probe sequence
gcaaagggacattattttgttaaga

SEQ ID NO: 262466 - DNA, 25 bp, Probe sequence
gaatgttccaagttatgacgcaaaa

SEQ ID NO: 262467 - DNA, 25 bp, Probe sequence
gaaggtatggtcttatacttagata

SEQ ID NO: 262468 - DNA, 25 bp, Probe sequence
gaagtcgttataatattcctactga

SEQ ID NO: 262469 - DNA, 25 bp, Probe sequence
gagaatgttccaagttatgacgcaa

SEQ ID NO: 262470 - DNA, 25 bp, Probe sequence
gttccaagttatgacgcaaaattta

SEQ ID NO: 262471 - DNA, 25 bp, Probe sequence
gttaagcaattaagaagtcgttata

SEQ ID NO: 262472 - DNA, 25 bp, Probe sequence
gtaatgaaggtatggtcttatactt

SEQ ID NO: 262473 - DNA, 25 bp, Probe sequence
ggtatggtcttatacttagatagaa

SEQ ID NO: 262474 - DNA, 25 bp, Probe sequence
tcctactgataaagcaccggtatta

SEQ ID NO: 262475 - DNA, 25 bp, Probe sequence
ggacaatatgcaaaccttaaagaat

SEQ ID NO: 262476 - DNA, 25 bp, Probe sequence
tacaacaatggtgatgtctcaatta

SEQ ID NO: 262477 - DNA, 25 bp, Probe sequence
tactgataaagcaccggtattaaaa

SEQ ID NO: 262478 - DNA, 25 bp, Probe sequence
tatacttagatagaaatacacggac

SEQ ID NO: 262479 - DNA, 25 bp, Probe sequence
tattcctactgataaagcaccggta

SEQ ID NO: 262480 - DNA, 25 bp, Probe sequence
ttggaaattgacttttcaaaaggtg

SEQ ID NO: 262481 - DNA, 25 bp, Probe sequence
ttgaaaggaagttctgtgggttata

SEQ ID NO: 262482 - DNA, 25 bp, Probe sequence
attctttgaatttccagccggcgaa

SEQ ID NO: 262483 - DNA, 25 bp, Probe sequence
atattcctactgataaagcaccggt

SEQ ID NO: 262484 - DNA, 25 bp, Probe sequence
atatttgcgatagcaggttgtggca

SEQ ID NO: 262485 - DNA, 25 bp, Probe sequence
atacagatttcgccaaaagtaataa

SEQ ID NO: 262486 - DNA, 25 bp, Probe sequence
aggtttgcattgtacataagcgtta

SEQ ID NO: 262487 - DNA, 25 bp, Probe sequence
agcgttatgattttaatatttgcga

SEQ ID NO: 262488 - DNA, 25 bp, Probe sequence
acaatggtgatgtctcaattaatga

SEQ ID NO: 262489 - DNA, 25 bp, Probe sequence
aaagcaccggtattaaaaatgcata

SEQ ID NO: 262490 - DNA, 25 bp, Probe sequence
aaactacaacaatggtgatgtctca

SEQ ID NO: 262491 - DNA, 25 bp, Probe sequence
aacagagagacgtgaagcgatggga

SEQ ID NO: 262492 - DNA, 25 bp, Probe sequence
aagagctttgcgaaaacattagata

SEQ ID NO: 262493 - DNA, 25 bp, Probe sequence
aaggtggaaaaagcgatttgtcagt

SEQ ID NO: 262494 - DNA, 25 bp, Probe sequence
gccggcgaaggtagatgaagatgat

SEQ ID NO: 262495 - DNA, 25 bp, Probe sequence
gcgatttgtcagtaatagattcttt

SEQ ID NO: 262496 - DNA, 25 bp, Probe sequence
gaatttccagccggcgaaggtagat

SEQ ID NO: 262497 - DNA, 25 bp, Probe sequence
gaatctcgaggacttatacgacaaa

SEQ ID NO: 262498 - DNA, 25 bp, Probe sequence
gaaggataccgagatggcgaattta

SEQ ID NO: 262499 - DNA, 25 bp, Probe sequence
gaaggtatggtcttatacttagata

SEQ ID NO: 262500 - DNA, 25 bp, Probe sequence
gaagtcgttataatattcctactga

SEQ ID NO: 262501 - DNA, 25 bp, Probe sequence
gacattctataataagggcaaattc

SEQ ID NO: 262502 - DNA, 25 bp, Probe sequence
gacgtgaagcgatgggatatttaaa

SEQ ID NO: 262503 - DNA, 25 bp, Probe sequence
gagaatgttccaagttatgacgcaa

SEQ ID NO: 262504 - DNA, 25 bp, Probe sequence
gatagcaggttgtggcaaaggtaat

SEQ ID NO: 262505 - DNA, 25 bp, Probe sequence
gttccaagttatgacgcaaaattta

SEQ ID NO: 262506 - DNA, 25 bp, Probe sequence
gggacattattttgttaagacattc

SEQ ID NO: 262507 - DNA, 25 bp, Probe sequence
gggtgataaagggatgtggacgata

SEQ ID NO: 262508 - DNA, 25 bp, Probe sequence
ggacgatatatacagatttcgccaa

SEQ ID NO: 262509 - DNA, 25 bp, Probe sequence
tggacaatatgcaaaccttaaagaa

SEQ ID NO: 262510 - DNA, 25 bp, Probe sequence
taataagggcaaattcccagataga

SEQ ID NO: 262511 - DNA, 25 bp, Probe sequence
tacacggactgcaaagggacattat

SEQ ID NO: 262512 - DNA, 25 bp, Probe sequence
tagattctttgaatttccagccggc

SEQ ID NO: 262513 - DNA, 25 bp, Probe sequence
tatgtatccaattaagaatctcgag

SEQ ID NO: 262514 - DNA, 25 bp, Probe sequence
ttagatagaaatacacggactgcaa

SEQ ID NO: 262515 - DNA, 25 bp, Probe sequence
ttgaaaggaagttctgtgggttata

SEQ ID NO: 262516 - DNA, 25 bp, Probe sequence
attctagactttaccgaagcaacaa

SEQ ID NO: 262517 - DNA, 25 bp, Probe sequence
attaattctagactttaccgaagca

SEQ ID NO: 262518 - DNA, 25 bp, Probe sequence
attatttattatgatggcgtggtta

SEQ ID NO: 262519 - DNA, 25 bp, Probe sequence
atctcactgatttatttaagaccat

SEQ ID NO: 262520 - DNA, 25 bp, Probe sequence
agtgcccagcagaaattgcaagata

SEQ ID NO: 262521 - DNA, 25 bp, Probe sequence
agactttaccgaagcaacaaatctc

SEQ ID NO: 262522 - DNA, 25 bp, Probe sequence
accgaagcaacaaatctcactgatt

SEQ ID NO: 262523 - DNA, 25 bp, Probe sequence
aaagtgcccagcagaaattgcaaga

SEQ ID NO: 262524 - DNA, 25 bp, Probe sequence
aaaagtgcccagcagaaattgcaag

SEQ ID NO: 262525 - DNA, 25 bp, Probe sequence
aagcaacaaatctcactgatttatt

SEQ ID NO: 262526 - DNA, 25 bp, Probe sequence
aagtgcccagcagaaattgcaagat

SEQ ID NO: 262527 - DNA, 25 bp, Probe sequence
aatgatattaattctagactttacc

SEQ ID NO: 262528 - DNA, 25 bp, Probe sequence
aatctcactgatttatttaagacca

SEQ ID NO: 262529 - DNA, 25 bp, Probe sequence
aattctagactttaccgaagcaaca

SEQ ID NO: 262530 - DNA, 25 bp, Probe sequence
catatccaggttctaaagaaatgat

SEQ ID NO: 262531 - DNA, 25 bp, Probe sequence
ctagactttaccgaagcaacaaatc

SEQ ID NO: 262532 - DNA, 25 bp, Probe sequence
ctaaaagtgcccagcagaaattgca

SEQ ID NO: 262533 - DNA, 25 bp, Probe sequence
ctcactgatttatttaagaccataa

SEQ ID NO: 262534 - DNA, 25 bp, Probe sequence
gcgactaaaagtgcccagcagaaat

SEQ ID NO: 262535 - DNA, 25 bp, Probe sequence
gcccagcagaaattgcaagataata

SEQ ID NO: 262536 - DNA, 25 bp, Probe sequence
gcaacaaatctcactgatttattta

SEQ ID NO: 262537 - DNA, 25 bp, Probe sequence
gaagcaacaaatctcactgatttat

SEQ ID NO: 262538 - DNA, 25 bp, Probe sequence
gactaaaagtgcccagcagaaattg

SEQ ID NO: 262539 - DNA, 25 bp, Probe sequence
gatattaattctagactttaccgaa

SEQ ID NO: 262540 - DNA, 25 bp, Probe sequence
gtgcccagcagaaattgcaagataa

SEQ ID NO: 262541 - DNA, 25 bp, Probe sequence
ggcgactaaaagtgcccagcagaaa

SEQ ID NO: 262542 - DNA, 25 bp, Probe sequence
tgatattaattctagactttaccga

SEQ ID NO: 262543 - DNA, 25 bp, Probe sequence
tcgccatatccaggttctaaagaaa

SEQ ID NO: 262544 - DNA, 25 bp, Probe sequence
taattctagactttaccgaagcaac

SEQ ID NO: 262545 - DNA, 25 bp, Probe sequence
taccgaagcaacaaatctcactgat

SEQ ID NO: 262546 - DNA, 25 bp, Probe sequence
tagactttaccgaagcaacaaatct

SEQ ID NO: 262547 - DNA, 25 bp, Probe sequence
tattaattctagactttaccgaagc

SEQ ID NO: 262548 - DNA, 25 bp, Probe sequence
ttaattctagactttaccgaagcaa

SEQ ID NO: 262549 - DNA, 25 bp, Probe sequence
ttctagactttaccgaagcaacaaa

SEQ ID NO: 262550 - DNA, 25 bp, Probe sequence
attgtgatgatttattgtttgaaag

SEQ ID NO: 262551 - DNA, 25 bp, Probe sequence
attaggtgtggttattgtgatgatt

SEQ ID NO: 262552 - DNA, 25 bp, Probe sequence
atgcattaacggtgagattgcacaa

SEQ ID NO: 262553 - DNA, 25 bp, Probe sequence
atgtgtcaatacttatgtttgaaaa

SEQ ID NO: 262554 - DNA, 25 bp, Probe sequence
aggtgtggttattgtgatgatttat

SEQ ID NO: 262555 - DNA, 25 bp, Probe sequence
agttgatgcattaacggtgagattg

SEQ ID NO: 262556 - DNA, 25 bp, Probe sequence
aaagtgttgaattaggtgtggttat

SEQ ID NO: 262557 - DNA, 25 bp, Probe sequence
aaagttgatgcattaacggtgagat

SEQ ID NO: 262558 - DNA, 25 bp, Probe sequence
aagttgatgcattaacggtgagatt

SEQ ID NO: 262559 - DNA, 25 bp, Probe sequence
aagtgttgaattaggtgtggttatt

SEQ ID NO: 262560 - DNA, 25 bp, Probe sequence
gaattaggtgtggttattgtgatga

SEQ ID NO: 262561 - DNA, 25 bp, Probe sequence
gaaaagtgttgaattaggtgtggtt

SEQ ID NO: 262562 - DNA, 25 bp, Probe sequence
gaaagttgatgcattaacggtgaga

SEQ ID NO: 262563 - DNA, 25 bp, Probe sequence
gatgatttattgtttgaaagttgat

SEQ ID NO: 262564 - DNA, 25 bp, Probe sequence
gatgcattaacggtgagattgcaca

SEQ ID NO: 262565 - DNA, 25 bp, Probe sequence
gatttattgtttgaaagttgatgca

SEQ ID NO: 262566 - DNA, 25 bp, Probe sequence
gttgaattaggtgtggttattgtga

SEQ ID NO: 262567 - DNA, 25 bp, Probe sequence
gttgatgcattaacggtgagattgc

SEQ ID NO: 262568 - DNA, 25 bp, Probe sequence
gttattgtgatgatttattgtttga

SEQ ID NO: 262569 - DNA, 25 bp, Probe sequence
gtttgaaagttgatgcattaacggt

SEQ ID NO: 262570 - DNA, 25 bp, Probe sequence
gtgatgatttattgtttgaaagttg

SEQ ID NO: 262571 - DNA, 25 bp, Probe sequence
gtgttgaattaggtgtggttattgt

SEQ ID NO: 262572 - DNA, 25 bp, Probe sequence
gtgtcaatacttatgtttgaaaagt

SEQ ID NO: 262573 - DNA, 25 bp, Probe sequence
gtgtggttattgtgatgatttattg

SEQ ID NO: 262574 - DNA, 25 bp, Probe sequence
gtggttattgtgatgatttattgtt

SEQ ID NO: 262575 - DNA, 25 bp, Probe sequence
ggtgtggttattgtgatgatttatt

SEQ ID NO: 262576 - DNA, 25 bp, Probe sequence
ggttattgtgatgatttattgtttg

SEQ ID NO: 262577 - DNA, 25 bp, Probe sequence
tgatgcattaacggtgagattgcac

SEQ ID NO: 262578 - DNA, 25 bp, Probe sequence
tgcattaacggtgagattgcacaat

SEQ ID NO: 262579 - DNA, 25 bp, Probe sequence
taggtgtggttattgtgatgattta

SEQ ID NO: 262580 - DNA, 25 bp, Probe sequence
tattgtttgaaagttgatgcattaa

SEQ ID NO: 262581 - DNA, 25 bp, Probe sequence
ttattgtgatgatttattgtttgaa

SEQ ID NO: 262582 - DNA, 25 bp, Probe sequence
ttaggtgtggttattgtgatgattt

SEQ ID NO: 262583 - DNA, 25 bp, Probe sequence
ttgaaagttgatgcattaacggtga

SEQ ID NO: 262584 - DNA, 25 bp, Probe sequence
atgaaggaaaaccgcacgacaatga

SEQ ID NO: 262585 - DNA, 25 bp, Probe sequence
atgtcgatgtgactaaggacgagga

SEQ ID NO: 262586 - DNA, 25 bp, Probe sequence
atggttactactatgtcgatgtgac

SEQ ID NO: 262587 - DNA, 25 bp, Probe sequence
atggtagctaaaggcatggttctat

SEQ ID NO: 262588 - DNA, 25 bp, Probe sequence
aggctatcgtgatgatcagtttgat

SEQ ID NO: 262589 - DNA, 25 bp, Probe sequence
aggtacatggattataaattctgaa

SEQ ID NO: 262590 - DNA, 25 bp, Probe sequence
agtgttaggcattatttttctgttt

SEQ ID NO: 262591 - DNA, 25 bp, Probe sequence
actatgtcgatgtgactaaggacga

SEQ ID NO: 262592 - DNA, 25 bp, Probe sequence
acattgagtatgtaccctattaaaa

SEQ ID NO: 262593 - DNA, 25 bp, Probe sequence
acaacaaatggttactactatgtcg

SEQ ID NO: 262594 - DNA, 25 bp, Probe sequence
aaatggttactactatgtcgatgtg

SEQ ID NO: 262595 - DNA, 25 bp, Probe sequence
aatggttactactatgtcgatgtga

SEQ ID NO: 262596 - DNA, 25 bp, Probe sequence
caaatggttactactatgtcgatgt

SEQ ID NO: 262597 - DNA, 25 bp, Probe sequence
cgatgtgactaaggacgaggatgaa

SEQ ID NO: 262598 - DNA, 25 bp, Probe sequence
gaaggaaaaccgcacgacaatgaaa

SEQ ID NO: 262599 - DNA, 25 bp, Probe sequence
gaaaaccgcacgacaatgaaaaaag

SEQ ID NO: 262600 - DNA, 25 bp, Probe sequence
gaaatggttattcaacctaataatg

SEQ ID NO: 262601 - DNA, 25 bp, Probe sequence
gaggatgaaggaaaaccgcacgaca

SEQ ID NO: 262602 - DNA, 25 bp, Probe sequence
gatatggtagctaaaggcatggttc

SEQ ID NO: 262603 - DNA, 25 bp, Probe sequence
gttactactatgtcgatgtgactaa

SEQ ID NO: 262604 - DNA, 25 bp, Probe sequence
gtatgtaccctattaaaaatctaga

SEQ ID NO: 262605 - DNA, 25 bp, Probe sequence
gtgttaggcattatttttctgtttt

SEQ ID NO: 262606 - DNA, 25 bp, Probe sequence
ggtagctaaaggcatggttctatat

SEQ ID NO: 262607 - DNA, 25 bp, Probe sequence
ggatgaaggaaaaccgcacgacaat

SEQ ID NO: 262608 - DNA, 25 bp, Probe sequence
ggacgaggatgaaggaaaaccgcac

SEQ ID NO: 262609 - DNA, 25 bp, Probe sequence
ggcattatttttctgtttttagtca

SEQ ID NO: 262610 - DNA, 25 bp, Probe sequence
ggctatcgtgatgatcagtttgata

SEQ ID NO: 262611 - DNA, 25 bp, Probe sequence
tggttactactatgtcgatgtgact

SEQ ID NO: 262612 - DNA, 25 bp, Probe sequence
tgttaggcattatttttctgttttt

SEQ ID NO: 262613 - DNA, 25 bp, Probe sequence
tgagtatgtaccctattaaaaatct

SEQ ID NO: 262614 - DNA, 25 bp, Probe sequence
tactactatgtcgatgtgactaagg

SEQ ID NO: 262615 - DNA, 25 bp, Probe sequence
tagctaaaggcatggttctatatat

SEQ ID NO: 262616 - DNA, 25 bp, Probe sequence
taggcattatttttctgtttttagt

SEQ ID NO: 262617 - DNA, 25 bp, Probe sequence
ttagtgttaggcattatttttctgt

SEQ ID NO: 262618 - DNA, 25 bp, Probe sequence
attggagcattggtatcatctatta

SEQ ID NO: 262619 - DNA, 25 bp, Probe sequence
attgtcacagtgatgttgtcgctta

SEQ ID NO: 262620 - DNA, 25 bp, Probe sequence
attctcagttgttggtgttattgtc

SEQ ID NO: 262621 - DNA, 25 bp, Probe sequence
attaggtattttattctcagttgtt

SEQ ID NO: 262622 - DNA, 25 bp, Probe sequence
attattggagcattggtatcatcta

SEQ ID NO: 262623 - DNA, 25 bp, Probe sequence
atatgaaacaacttggatacttcca

SEQ ID NO: 262624 - DNA, 25 bp, Probe sequence
agcattggtatcatctattactgcg

SEQ ID NO: 262625 - DNA, 25 bp, Probe sequence
acagtgatgttgtcgcttagcggag

SEQ ID NO: 262626 - DNA, 25 bp, Probe sequence
aaccatttttgtctcaatatgaaac

SEQ ID NO: 262627 - DNA, 25 bp, Probe sequence
caacttggatacttccaattttagg

SEQ ID NO: 262628 - DNA, 25 bp, Probe sequence
cagttgttggtgttattgtcacagt

SEQ ID NO: 262629 - DNA, 25 bp, Probe sequence
cttcttcgcaggtcataataatcct

SEQ ID NO: 262630 - DNA, 25 bp, Probe sequence
ctatgtcttcttcgcaggtcataat

SEQ ID NO: 262631 - DNA, 25 bp, Probe sequence
gcgataatacctatgttttttggaa

SEQ ID NO: 262632 - DNA, 25 bp, Probe sequence
gcttttaatgttgaagaggttttag

SEQ ID NO: 262633 - DNA, 25 bp, Probe sequence
gcaggtcataataatcctggtggtg

SEQ ID NO: 262634 - DNA, 25 bp, Probe sequence
gaaaaccatttttgtctcaatatga

SEQ ID NO: 262635 - DNA, 25 bp, Probe sequence
gaaacaacttggatacttccaattt

SEQ ID NO: 262636 - DNA, 25 bp, Probe sequence
gatgttgtcgcttagcggaggtcga

SEQ ID NO: 262637 - DNA, 25 bp, Probe sequence
gttgtcgcttagcggaggtcgatca

SEQ ID NO: 262638 - DNA, 25 bp, Probe sequence
gttggtgttattgtcacagtgatgt

SEQ ID NO: 262639 - DNA, 25 bp, Probe sequence
gtttctggcttttaatgttgaagag

SEQ ID NO: 262640 - DNA, 25 bp, Probe sequence
gtacaataacactttttgaattagg

SEQ ID NO: 262641 - DNA, 25 bp, Probe sequence
gtcacagtgatgttgtcgcttagcg

SEQ ID NO: 262642 - DNA, 25 bp, Probe sequence
gtcttcttcgcaggtcataataatc

SEQ ID NO: 262643 - DNA, 25 bp, Probe sequence
gtcgcttagcggaggtcgatcatga

SEQ ID NO: 262644 - DNA, 25 bp, Probe sequence
ggtattttattctcagttgttggtg

SEQ ID NO: 262645 - DNA, 25 bp, Probe sequence
ggagcattggtatcatctattactg

SEQ ID NO: 262646 - DNA, 25 bp, Probe sequence
taatgtttctggcttttaatgttga

SEQ ID NO: 262647 - DNA, 25 bp, Probe sequence
tagaaagtttaccgattgattttag

SEQ ID NO: 262648 - DNA, 25 bp, Probe sequence
tttggaaaaccatttttgtctcaat

SEQ ID NO: 262649 - DNA, 25 bp, Probe sequence
ttttattctcagttgttggtgttat

SEQ ID NO: 262650 - DNA, 25 bp, Probe sequence
ttactgcgataatacctatgttttt

SEQ ID NO: 262651 - DNA, 25 bp, Probe sequence
ttctatgtcttcttcgcaggtcata

SEQ ID NO: 262652 - DNA, 25 bp, Probe sequence
attgtttgttgatcccttgttacaa

SEQ ID NO: 262653 - DNA, 25 bp, Probe sequence
attcgtattgtaatcggaatttcaa

SEQ ID NO: 262654 - DNA, 25 bp, Probe sequence
attatgagtatgggaacgtatggtt

SEQ ID NO: 262655 - DNA, 25 bp, Probe sequence
atatactcatgctggtaatctcatt

SEQ ID NO: 262656 - DNA, 25 bp, Probe sequence
ataggaacatatatgattttatcaa

SEQ ID NO: 262657 - DNA, 25 bp, Probe sequence
atactcatgctggtaatctcattat

SEQ ID NO: 262658 - DNA, 25 bp, Probe sequence
ataactggtggaaaccaattgtttg

SEQ ID NO: 262659 - DNA, 25 bp, Probe sequence
accaattgtttgttgatcccttgtt

SEQ ID NO: 262660 - DNA, 25 bp, Probe sequence
actcatgctggtaatctcattatta

SEQ ID NO: 262661 - DNA, 25 bp, Probe sequence
acttgtacttgtttatagaacttat

SEQ ID NO: 262662 - DNA, 25 bp, Probe sequence
aaaccaattgtttgttgatcccttg

SEQ ID NO: 262663 - DNA, 25 bp, Probe sequence
aacgtatggttctagtagatcagaa

SEQ ID NO: 262664 - DNA, 25 bp, Probe sequence
aaccaattgtttgttgatcccttgt

SEQ ID NO: 262665 - DNA, 25 bp, Probe sequence
aatatatactcatgctggtaatctc

SEQ ID NO: 262666 - DNA, 25 bp, Probe sequence
aatttcaatatatactcatgctggt

SEQ ID NO: 262667 - DNA, 25 bp, Probe sequence
aattgtttgttgatcccttgttaca

SEQ ID NO: 262668 - DNA, 25 bp, Probe sequence
caattgtttgttgatcccttgttac

SEQ ID NO: 262669 - DNA, 25 bp, Probe sequence
catgctggtaatctcattattatga

SEQ ID NO: 262670 - DNA, 25 bp, Probe sequence
gaagatgaaattgaaggcctaaggg

SEQ ID NO: 262671 - DNA, 25 bp, Probe sequence
gagtatgggaacgtatggttctagt

SEQ ID NO: 262672 - DNA, 25 bp, Probe sequence
gatcccttgttacaagctattgtac

SEQ ID NO: 262673 - DNA, 25 bp, Probe sequence
gattttatcaatcaatttaattcgt

SEQ ID NO: 262674 - DNA, 25 bp, Probe sequence
gttgatcccttgttacaagctattg

SEQ ID NO: 262675 - DNA, 25 bp, Probe sequence
gtttgttgatcccttgttacaagct

SEQ ID NO: 262676 - DNA, 25 bp, Probe sequence
gggaacgtatggttctagtagatca

SEQ ID NO: 262677 - DNA, 25 bp, Probe sequence
ggatttttagtgtttataggaacat

SEQ ID NO: 262678 - DNA, 25 bp, Probe sequence
ggaaaccaattgtttgttgatccct

SEQ ID NO: 262679 - DNA, 25 bp, Probe sequence
ggaatttcaatatatactcatgctg

SEQ ID NO: 262680 - DNA, 25 bp, Probe sequence
tgtttgttgatcccttgttacaagc

SEQ ID NO: 262681 - DNA, 25 bp, Probe sequence
tgttacaagctattgtactaactgc

SEQ ID NO: 262682 - DNA, 25 bp, Probe sequence
tgcgtttttacttgtacttgtttat

SEQ ID NO: 262683 - DNA, 25 bp, Probe sequence
tcccttgttacaagctattgtacta

SEQ ID NO: 262684 - DNA, 25 bp, Probe sequence
tttgttgatcccttgttacaagcta

SEQ ID NO: 262685 - DNA, 25 bp, Probe sequence
tttatcaatcaatttaattcgtatt

SEQ ID NO: 262686 - DNA, 25 bp, Probe sequence
atgtattttgattacgtgtcactta

SEQ ID NO: 262687 - DNA, 25 bp, Probe sequence
agacagtttattttatattgtttct

SEQ ID NO: 262688 - DNA, 25 bp, Probe sequence
acgtcttcaggtatgggtctatatt

SEQ ID NO: 262689 - DNA, 25 bp, Probe sequence
aaatgatcaacatgtttcgttatat

SEQ ID NO: 262690 - DNA, 25 bp, Probe sequence
aacgccatttcaacgtcatacagtt

SEQ ID NO: 262691 - DNA, 25 bp, Probe sequence
aagtggatgattatgtttatacaga

SEQ ID NO: 262692 - DNA, 25 bp, Probe sequence
aatggtctcgtataaactcgatgct

SEQ ID NO: 262693 - DNA, 25 bp, Probe sequence
gcggaaacgccatttcaacgtcata

SEQ ID NO: 262694 - DNA, 25 bp, Probe sequence
gcattactatatgaatggtctcgta

SEQ ID NO: 262695 - DNA, 25 bp, Probe sequence
gcatgtcggaagtgacaaatttgtc

SEQ ID NO: 262696 - DNA, 25 bp, Probe sequence
gcacgacataaaaacacctgtgaca

SEQ ID NO: 262697 - DNA, 25 bp, Probe sequence
gactgttggtaaggggacaactgtc

SEQ ID NO: 262698 - DNA, 25 bp, Probe sequence
gaaacgacgtcttcaggtatgggtc

SEQ ID NO: 262699 - DNA, 25 bp, Probe sequence
gaaattgttgaacgcatgtcggaag

SEQ ID NO: 262700 - DNA, 25 bp, Probe sequence
gacaactgtcagattgattttccca

SEQ ID NO: 262701 - DNA, 25 bp, Probe sequence
gatttagcggaaacgccatttcaac

SEQ ID NO: 262702 - DNA, 25 bp, Probe sequence
gtattggttttgatgttgactttaa

SEQ ID NO: 262703 - DNA, 25 bp, Probe sequence
gtcacgtcgactgttggtaagggga

SEQ ID NO: 262704 - DNA, 25 bp, Probe sequence
gtaaaggatcaattaggtattcacc

SEQ ID NO: 262705 - DNA, 25 bp, Probe sequence
gtcagattgattttcccattacaaa

SEQ ID NO: 262706 - DNA, 25 bp, Probe sequence
tgaacgaggatttacgtcaacggct

SEQ ID NO: 262707 - DNA, 25 bp, Probe sequence
gtgtcacttaaacgcatggtcattg

SEQ ID NO: 262708 - DNA, 25 bp, Probe sequence
ggtagcttattttttgaaatctcgc

SEQ ID NO: 262709 - DNA, 25 bp, Probe sequence
ggcattagtctaatcgattatgatt

SEQ ID NO: 262710 - DNA, 25 bp, Probe sequence
tcgtcaaatctcagcgcacaaagaa

SEQ ID NO: 262711 - DNA, 25 bp, Probe sequence
tctcgcatgaactggatattttgga

SEQ ID NO: 262712 - DNA, 25 bp, Probe sequence
tacacagctgtatattactagatta

SEQ ID NO: 262713 - DNA, 25 bp, Probe sequence
taggtattcacctgcaagtcacgtc

SEQ ID NO: 262714 - DNA, 25 bp, Probe sequence
tatgccgcgaatatttgaacgagga

SEQ ID NO: 262715 - DNA, 25 bp, Probe sequence
tatgattttccaatagacagtttat

SEQ ID NO: 262716 - DNA, 25 bp, Probe sequence
tatatcgtcaaatctcagcgcacaa

SEQ ID NO: 262717 - DNA, 25 bp, Probe sequence
tattaaagactatggcagaggtatt

SEQ ID NO: 262718 - DNA, 25 bp, Probe sequence
ttttttgaaatctcgcatgaactgg

SEQ ID NO: 262719 - DNA, 25 bp, Probe sequence
ttcacctgcaagtcacgtcgactgt

SEQ ID NO: 262720 - DNA, 25 bp, Probe sequence
aaagctttcaaacaaggaattatct

SEQ ID NO: 262721 - DNA, 25 bp, Probe sequence
atatgtctattgaagaaggcgagtt

SEQ ID NO: 262722 - DNA, 25 bp, Probe sequence
ataggagtgttaaagtggcaatttt

SEQ ID NO: 262723 - DNA, 25 bp, Probe sequence
aggcgagtttattgctattatgggt

SEQ ID NO: 262724 - DNA, 25 bp, Probe sequence
acaagtgccaaagcctaaaggaaat

SEQ ID NO: 262725 - DNA, 25 bp, Probe sequence
aaagatggtcaaattttcactgaat

SEQ ID NO: 262726 - DNA, 25 bp, Probe sequence
cacaaggttctattacattaaaagg

SEQ ID NO: 262727 - DNA, 25 bp, Probe sequence
cctctggatctgggaaaacgacatt

SEQ ID NO: 262728 - DNA, 25 bp, Probe sequence
gctgacgaaccaacaggtgcactgg

SEQ ID NO: 262729 - DNA, 25 bp, Probe sequence
gcactggattctaaaagtactcaag

SEQ ID NO: 262730 - DNA, 25 bp, Probe sequence
gaattataccaaggggatgacgata

SEQ ID NO: 262731 - DNA, 25 bp, Probe sequence
gaattatctgatatacgcaagcatg

SEQ ID NO: 262732 - DNA, 25 bp, Probe sequence
gaatgaagcatttaagtctacaatt

SEQ ID NO: 262733 - DNA, 25 bp, Probe sequence
gaaggcgagtttattgctattatgg

SEQ ID NO: 262734 - DNA, 25 bp, Probe sequence
gaagatacaagtgccaaagcctaaa

SEQ ID NO: 262735 - DNA, 25 bp, Probe sequence
gaaccaacaggtgcactggattcta

SEQ ID NO: 262736 - DNA, 25 bp, Probe sequence
gaaaacataatgttaccactaacgg

SEQ ID NO: 262737 - DNA, 25 bp, Probe sequence
gacgataaacatacctttttcaaag

SEQ ID NO: 262738 - DNA, 25 bp, Probe sequence
gattatatttcacaaggttctatta

SEQ ID NO: 262739 - DNA, 25 bp, Probe sequence
gtagtgatgctaaaagatggtcaaa

SEQ ID NO: 262740 - DNA, 25 bp, Probe sequence
gtctacaattattatggtaacgcat

SEQ ID NO: 262741 - DNA, 25 bp, Probe sequence
ggtgcactggattctaaaagtactc

SEQ ID NO: 262742 - DNA, 25 bp, Probe sequence
ggtaacgcatgatcctgttgcagca

SEQ ID NO: 262743 - DNA, 25 bp, Probe sequence
ggatctgggaaaacgacattattaa

SEQ ID NO: 262744 - DNA, 25 bp, Probe sequence
ggatgacgataaacatacctttttc

SEQ ID NO: 262745 - DNA, 25 bp, Probe sequence
tgatatacgcaagcatgatattggt

SEQ ID NO: 262746 - DNA, 25 bp, Probe sequence
taatttactgcatacattgactgtt

SEQ ID NO: 262747 - DNA, 25 bp, Probe sequence
taacgcatgatcctgttgcagcaag

SEQ ID NO: 262748 - DNA, 25 bp, Probe sequence
tactgcatacattgactgttaaaga

SEQ ID NO: 262749 - DNA, 25 bp, Probe sequence
taggtggcgttaattatgaccttta

SEQ ID NO: 262750 - DNA, 25 bp, Probe sequence
tatttcacaaggttctattacatta

SEQ ID NO: 262751 - DNA, 25 bp, Probe sequence
tttgctgacgaaccaacaggtgcac

SEQ ID NO: 262752 - DNA, 25 bp, Probe sequence
ttttcactgaattataccaagggga

SEQ ID NO: 262753 - DNA, 25 bp, Probe sequence
ttctattatatttgctgacgaacca

SEQ ID NO: 262754 - DNA, 25 bp, Probe sequence
attagttttttgatattagtcatta

SEQ ID NO: 262755 - DNA, 25 bp, Probe sequence
atagtgagtgaaacacttcatgatg

SEQ ID NO: 262756 - DNA, 25 bp, Probe sequence
atagaaacactaagactacaaccgg

SEQ ID NO: 262757 - DNA, 25 bp, Probe sequence
agttttttgatattagtcattagtt

SEQ ID NO: 262758 - DNA, 25 bp, Probe sequence
acaaccgggaagtatatagtgagtg

SEQ ID NO: 262759 - DNA, 25 bp, Probe sequence
cactaagactacaaccgggaagtat

SEQ ID NO: 262760 - DNA, 25 bp, Probe sequence
aaatcaaaaggtatggttctatata

SEQ ID NO: 262761 - DNA, 25 bp, Probe sequence
aaccgggaagtatatagtgagtgaa

SEQ ID NO: 262762 - DNA, 25 bp, Probe sequence
caaccgggaagtatatagtgagtga

SEQ ID NO: 262763 - DNA, 25 bp, Probe sequence
aagactacaaccgggaagtatatag

SEQ ID NO: 262764 - DNA, 25 bp, Probe sequence
aatcaaaaggtatggttctatatat

SEQ ID NO: 262765 - DNA, 25 bp, Probe sequence
caaattggtattgtatattagtttt

SEQ ID NO: 262766 - DNA, 25 bp, Probe sequence
cttcatgatgaagatggtagaccta

SEQ ID NO: 262767 - DNA, 25 bp, Probe sequence
ctaagactacaaccgggaagtatat

SEQ ID NO: 262768 - DNA, 25 bp, Probe sequence
ctacaaccgggaagtatatagtgag

SEQ ID NO: 262769 - DNA, 25 bp, Probe sequence
ctgaaatggttgttcaacctaaagg

SEQ ID NO: 262770 - DNA, 25 bp, Probe sequence
ccgggaagtatatagtgagtgaaac

SEQ ID NO: 262771 - DNA, 25 bp, Probe sequence
gaatagaaacactaagactacaacc

SEQ ID NO: 262772 - DNA, 25 bp, Probe sequence
gaagatggtagacctaagagtaaag

SEQ ID NO: 262773 - DNA, 25 bp, Probe sequence
gactacaaccgggaagtatatagtg

SEQ ID NO: 262774 - DNA, 25 bp, Probe sequence
gatggtagacctaagagtaaagata

SEQ ID NO: 262775 - DNA, 25 bp, Probe sequence
gatgaagatggtagacctaagagta

SEQ ID NO: 262776 - DNA, 25 bp, Probe sequence
tgttcaacctaaaggggaacgtatg

SEQ ID NO: 262777 - DNA, 25 bp, Probe sequence
gggaacgtatgaaatcaaaaggtat

SEQ ID NO: 262778 - DNA, 25 bp, Probe sequence
gtatattagttttttgatattagtc

SEQ ID NO: 262779 - DNA, 25 bp, Probe sequence
gtagacctaagagtaaagataaaga

SEQ ID NO: 262780 - DNA, 25 bp, Probe sequence
gtgaaaatactttttttactgatag

SEQ ID NO: 262781 - DNA, 25 bp, Probe sequence
gtgagtgaaacacttcatgatgaag

SEQ ID NO: 262782 - DNA, 25 bp, Probe sequence
tggtattgtatattagttttttgat

SEQ ID NO: 262783 - DNA, 25 bp, Probe sequence
tgatattagtcattagtttcactgc

SEQ ID NO: 262784 - DNA, 25 bp, Probe sequence
tccaactaaaggtatcaaagacgaa

SEQ ID NO: 262785 - DNA, 25 bp, Probe sequence
tcatgatgaagatggtagacctaag

SEQ ID NO: 262786 - DNA, 25 bp, Probe sequence
taagactacaaccgggaagtatata

SEQ ID NO: 262787 - DNA, 25 bp, Probe sequence
tagaaacactaagactacaaccggg

SEQ ID NO: 262788 - DNA, 25 bp, Probe sequence
attaatcacttttgtgttgtgccac

SEQ ID NO: 262789 - DNA, 25 bp, Probe sequence
attttgttgctaaaggcccagaagt

SEQ ID NO: 262790 - DNA, 25 bp, Probe sequence
atcacttttgtgttgtgccacaaat

SEQ ID NO: 262791 - DNA, 25 bp, Probe sequence
atcgcgtgaatgtagcaacaaacaa

SEQ ID NO: 262792 - DNA, 25 bp, Probe sequence
atccagcttcacaacaagttgataa

SEQ ID NO: 262793 - DNA, 25 bp, Probe sequence
atgactataaatacttctattctta

SEQ ID NO: 262794 - DNA, 25 bp, Probe sequence
aggtaattccaccatatggtcacaa

SEQ ID NO: 262795 - DNA, 25 bp, Probe sequence
acaccagggcatgctagcattaaaa

SEQ ID NO: 262796 - DNA, 25 bp, Probe sequence
aaagcatatgactataaatacttct

SEQ ID NO: 262797 - DNA, 25 bp, Probe sequence
aacactttattgttaaaccatcaga

SEQ ID NO: 262798 - DNA, 25 bp, Probe sequence
aaggcccagaagtaaatagatttat

SEQ ID NO: 262799 - DNA, 25 bp, Probe sequence
aataatcgcgtgaatgtagcaacaa

SEQ ID NO: 262800 - DNA, 25 bp, Probe sequence
aatacttctattcttataaagtagt

SEQ ID NO: 262801 - DNA, 25 bp, Probe sequence
aatagtttcaaggtaattccaccat

SEQ ID NO: 262802 - DNA, 25 bp, Probe sequence
aatatttctcattttcacaatcaaa

SEQ ID NO: 262803 - DNA, 25 bp, Probe sequence
caaggtaattccaccatatggtcac

SEQ ID NO: 262804 - DNA, 25 bp, Probe sequence
caaagtaaaccaccacttcattact

SEQ ID NO: 262805 - DNA, 25 bp, Probe sequence
gcattttgttgctaaaggcccagaa

SEQ ID NO: 262806 - DNA, 25 bp, Probe sequence
gcatcagtgacagagagtgttgaca

SEQ ID NO: 262807 - DNA, 25 bp, Probe sequence
gaagaaatatttctcattttcacaa

SEQ ID NO: 262808 - DNA, 25 bp, Probe sequence
gttgtgccacaaataaatagtttca

SEQ ID NO: 262809 - DNA, 25 bp, Probe sequence
gttgctaaaggcccagaagtaaata

SEQ ID NO: 262810 - DNA, 25 bp, Probe sequence
gtttcaaggtaattccaccatatgg

SEQ ID NO: 262811 - DNA, 25 bp, Probe sequence
gtaattccaccatatggtcacaatt

SEQ ID NO: 262812 - DNA, 25 bp, Probe sequence
gggcatgctagcattaaaattaatc

SEQ ID NO: 262813 - DNA, 25 bp, Probe sequence
ggattctattaataaacactttatt

SEQ ID NO: 262814 - DNA, 25 bp, Probe sequence
tgtagttccagaatcaggaattaat

SEQ ID NO: 262815 - DNA, 25 bp, Probe sequence
tcagtgacagagagtgttgacaaaa

SEQ ID NO: 262816 - DNA, 25 bp, Probe sequence
tcacaacaagttgataagcattttg

SEQ ID NO: 262817 - DNA, 25 bp, Probe sequence
taatcacttttgtgttgtgccacaa

SEQ ID NO: 262818 - DNA, 25 bp, Probe sequence
tacgttcctgaatttaagggtagct

SEQ ID NO: 262819 - DNA, 25 bp, Probe sequence
ttaagggtagcttaccagcaccacg

SEQ ID NO: 262820 - DNA, 25 bp, Probe sequence
tttgttgctaaaggcccagaagtaa

SEQ ID NO: 262821 - DNA, 25 bp, Probe sequence
ttctcattttcacaatcaaatggtt

SEQ ID NO: 262822 - DNA, 25 bp, Probe sequence
atttggaaagttacgaacacacaga

SEQ ID NO: 262823 - DNA, 25 bp, Probe sequence
atagaacacttggtttatcaacttg

SEQ ID NO: 262824 - DNA, 25 bp, Probe sequence
atcaacttgagttaagtgtcatgaa

SEQ ID NO: 262825 - DNA, 25 bp, Probe sequence
atgttaatggtattgaagtggtttc

SEQ ID NO: 262826 - DNA, 25 bp, Probe sequence
agtggtttcagagatcagtcgtgaa

SEQ ID NO: 262827 - DNA, 25 bp, Probe sequence
agaacacttggtttatcaacttgag

SEQ ID NO: 262828 - DNA, 25 bp, Probe sequence
tagaacacttggtttatcaacttga

SEQ ID NO: 262829 - DNA, 25 bp, Probe sequence
acttggtttatcaacttgagttaag

SEQ ID NO: 262830 - DNA, 25 bp, Probe sequence
acacttggtttatcaacttgagtta

SEQ ID NO: 262831 - DNA, 25 bp, Probe sequence
aaagttacgaacacacagaatatgt

SEQ ID NO: 262832 - DNA, 25 bp, Probe sequence
aacacttggtttatcaacttgagtt

SEQ ID NO: 262833 - DNA, 25 bp, Probe sequence
aagtggtttcagagatcagtcgtga

SEQ ID NO: 262834 - DNA, 25 bp, Probe sequence
aagtgtcatgaataatttggaaagt

SEQ ID NO: 262835 - DNA, 25 bp, Probe sequence
aatggtgcgcacaagaattaaagaa

SEQ ID NO: 262836 - DNA, 25 bp, Probe sequence
aatgaaatggtgcgcacaagaatta

SEQ ID NO: 262837 - DNA, 25 bp, Probe sequence
aatagaacacttggtttatcaactt

SEQ ID NO: 262838 - DNA, 25 bp, Probe sequence
cagtcgtgaaaagcacttagaattg

SEQ ID NO: 262839 - DNA, 25 bp, Probe sequence
gaattgataatgaaatggtgcgcac

SEQ ID NO: 262840 - DNA, 25 bp, Probe sequence
gaagtggtttcagagatcagtcgtg

SEQ ID NO: 262841 - DNA, 25 bp, Probe sequence
gaacacacagaatatgttaatggta

SEQ ID NO: 262842 - DNA, 25 bp, Probe sequence
gaacacttggtttatcaacttgagt

SEQ ID NO: 262843 - DNA, 25 bp, Probe sequence
gaaaagcacttagaattgataatga

SEQ ID NO: 262844 - DNA, 25 bp, Probe sequence
gaaatggtgcgcacaagaattaaag

SEQ ID NO: 262845 - DNA, 25 bp, Probe sequence
gagatcagtcgtgaaaagcacttag

SEQ ID NO: 262846 - DNA, 25 bp, Probe sequence
gagttaagtgtcatgaataatttgg

SEQ ID NO: 262847 - DNA, 25 bp, Probe sequence
gatcagtcgtgaaaagcacttagaa

SEQ ID NO: 262848 - DNA, 25 bp, Probe sequence
gttacgaacacacagaatatgttaa

SEQ ID NO: 262849 - DNA, 25 bp, Probe sequence
gtaatagaacacttggtttatcaac

SEQ ID NO: 262850 - DNA, 25 bp, Probe sequence
gtggtttcagagatcagtcgtgaaa

SEQ ID NO: 262851 - DNA, 25 bp, Probe sequence
ggtgcgcacaagaattaaagaataa

SEQ ID NO: 262852 - DNA, 25 bp, Probe sequence
ggtttatcaacttgagttaagtgtc

SEQ ID NO: 262853 - DNA, 25 bp, Probe sequence
ggaaagttacgaacacacagaatat

SEQ ID NO: 262854 - DNA, 25 bp, Probe sequence
tgataatgaaatggtgcgcacaaga

SEQ ID NO: 262855 - DNA, 25 bp, Probe sequence
tcagagatcagtcgtgaaaagcact

SEQ ID NO: 262856 - DNA, 25 bp, Probe sequence
atcactcccagctcaaaagcaagca

SEQ ID NO: 262857 - DNA, 25 bp, Probe sequence
atcatgttcatattctaagtgttca

SEQ ID NO: 262858 - DNA, 25 bp, Probe sequence
atctcgctttgtctgttcattcaaa

SEQ ID NO: 262859 - DNA, 25 bp, Probe sequence
atgaatgaatctcgctttgtctgtt

SEQ ID NO: 262860 - DNA, 25 bp, Probe sequence
atggtaccacctattgtttcggcaa

SEQ ID NO: 262861 - DNA, 25 bp, Probe sequence
acccgcaagccttatcaggtacgaa

SEQ ID NO: 262862 - DNA, 25 bp, Probe sequence
aaagcacaaaaccatatcctccata

SEQ ID NO: 262863 - DNA, 25 bp, Probe sequence
aaacatgctgcatccctatattgat

SEQ ID NO: 262864 - DNA, 25 bp, Probe sequence
aagcgtttgatcgcctaaaactcaa

SEQ ID NO: 262865 - DNA, 25 bp, Probe sequence
aacgagccattggttatttgcgcca

SEQ ID NO: 262866 - DNA, 25 bp, Probe sequence
aagcccttgttgggatctatttcaa

SEQ ID NO: 262867 - DNA, 25 bp, Probe sequence
aagtacgctaactcaagaacaactg

SEQ ID NO: 262868 - DNA, 25 bp, Probe sequence
caacgaaacaacaatcactcccagc

SEQ ID NO: 262869 - DNA, 25 bp, Probe sequence
cagaacttctttcaaaaccaacagc

SEQ ID NO: 262870 - DNA, 25 bp, Probe sequence
catgctcaagcaatccgtaataaga

SEQ ID NO: 262871 - DNA, 25 bp, Probe sequence
cgcctttcggttatcactatcaaaa

SEQ ID NO: 262872 - DNA, 25 bp, Probe sequence
gcaacttcactgtataccttcagag

SEQ ID NO: 262873 - DNA, 25 bp, Probe sequence
gcaattcatcaacgcctcaaaaaac

SEQ ID NO: 262874 - DNA, 25 bp, Probe sequence
gaatcgacttcatcgcaacttgaaa

SEQ ID NO: 262875 - DNA, 25 bp, Probe sequence
gaatcacctaccgtcaaagctgtat

SEQ ID NO: 262876 - DNA, 25 bp, Probe sequence
gaagttcaagtcttagctacatgtc

SEQ ID NO: 262877 - DNA, 25 bp, Probe sequence
gaaccaaacctcgcaatcatcgatt

SEQ ID NO: 262878 - DNA, 25 bp, Probe sequence
gaacattgtgaaccaaacctcgcaa

SEQ ID NO: 262879 - DNA, 25 bp, Probe sequence
gaacaggctatcaacaagtcaccga

SEQ ID NO: 262880 - DNA, 25 bp, Probe sequence
gagtctggctgaacttgaatccgat

SEQ ID NO: 262881 - DNA, 25 bp, Probe sequence
gatcaaatgtccttgttgtgactca

SEQ ID NO: 262882 - DNA, 25 bp, Probe sequence
gttatcgcttgaatcgacttcatcg

SEQ ID NO: 262883 - DNA, 25 bp, Probe sequence
gtgacgtattatgttgttatcgctt

SEQ ID NO: 262884 - DNA, 25 bp, Probe sequence
ggtaaactcataacgacccatgcgc

SEQ ID NO: 262885 - DNA, 25 bp, Probe sequence
tcaccgaacgcatccaacaaagaca

SEQ ID NO: 262886 - DNA, 25 bp, Probe sequence
taaacttattacccgcaagccttat

SEQ ID NO: 262887 - DNA, 25 bp, Probe sequence
tagctccaaagcacaatattcaaaa

SEQ ID NO: 262888 - DNA, 25 bp, Probe sequence
ttcacgttaaacatgctgcatccct

SEQ ID NO: 262889 - DNA, 25 bp, Probe sequence
ttagctacatgtcagaacttctttc

SEQ ID NO: 262890 - DNA, 25 bp, Probe sequence
atttagctaagcaaaacaggattat

SEQ ID NO: 262891 - DNA, 25 bp, Probe sequence
atactaaaaaggtcgcaaatgcatt

SEQ ID NO: 262892 - DNA, 25 bp, Probe sequence
ataatactaaaaaggtcgcaaatgc

SEQ ID NO: 262893 - DNA, 25 bp, Probe sequence
atgcagttgatttggatattaaaaa

SEQ ID NO: 262894 - DNA, 25 bp, Probe sequence
aggtcgcaaatgcatttggtttaaa

SEQ ID NO: 262895 - DNA, 25 bp, Probe sequence
acgctacaaaatttagctaagcaaa

SEQ ID NO: 262896 - DNA, 25 bp, Probe sequence
actaaaaaggtcgcaaatgcatttg

SEQ ID NO: 262897 - DNA, 25 bp, Probe sequence
acaacgctacaaaatttagctaagc

SEQ ID NO: 262898 - DNA, 25 bp, Probe sequence
aaatctattaataaatgcagttgat

SEQ ID NO: 262899 - DNA, 25 bp, Probe sequence
aaaggtcgcaaatgcatttggttta

SEQ ID NO: 262900 - DNA, 25 bp, Probe sequence
aaaaaggtcgcaaatgcatttggtt

SEQ ID NO: 262901 - DNA, 25 bp, Probe sequence
aaaaggtcgcaaatgcatttggttt

SEQ ID NO: 262902 - DNA, 25 bp, Probe sequence
aacgctacaaaatttagctaagcaa

SEQ ID NO: 262903 - DNA, 25 bp, Probe sequence
aaggtcgcaaatgcatttggtttaa

SEQ ID NO: 262904 - DNA, 25 bp, Probe sequence
aatgcagttgatttggatattaaaa

SEQ ID NO: 262905 - DNA, 25 bp, Probe sequence
aataaatgcagttgatttggatatt

SEQ ID NO: 262906 - DNA, 25 bp, Probe sequence
aatactaaaaaggtcgcaaatgcat

SEQ ID NO: 262907 - DNA, 25 bp, Probe sequence
caacgctacaaaatttagctaagca

SEQ ID NO: 262908 - DNA, 25 bp, Probe sequence
ctaaaaaggtcgcaaatgcatttgg

SEQ ID NO: 262909 - DNA, 25 bp, Probe sequence
gctaagcaaaacaggattattaaat

SEQ ID NO: 262910 - DNA, 25 bp, Probe sequence
gcagttgatttggatattaaaaaca

SEQ ID NO: 262911 - DNA, 25 bp, Probe sequence
gcaaatgcatttggtttaaatgaag

SEQ ID NO: 262912 - DNA, 25 bp, Probe sequence
gatacaaatctattaataaatgcag

SEQ ID NO: 262913 - DNA, 25 bp, Probe sequence
gtacaacgctacaaaatttagctaa

SEQ ID NO: 262914 - DNA, 25 bp, Probe sequence
gtcgcaaatgcatttggtttaaatg

SEQ ID NO: 262915 - DNA, 25 bp, Probe sequence
ggtcgcaaatgcatttggtttaaat

SEQ ID NO: 262916 - DNA, 25 bp, Probe sequence
ggtacaacgctacaaaatttagcta

SEQ ID NO: 262917 - DNA, 25 bp, Probe sequence
taaaaaggtcgcaaatgcatttggt

SEQ ID NO: 262918 - DNA, 25 bp, Probe sequence
taaatgcagttgatttggatattaa

SEQ ID NO: 262919 - DNA, 25 bp, Probe sequence
tacaaatctattaataaatgcagtt

SEQ ID NO: 262920 - DNA, 25 bp, Probe sequence
tactaaaaaggtcgcaaatgcattt

SEQ ID NO: 262921 - DNA, 25 bp, Probe sequence
tagctaagcaaaacaggattattaa

SEQ ID NO: 262922 - DNA, 25 bp, Probe sequence
ttagctaagcaaaacaggattatta

SEQ ID NO: 262923 - DNA, 25 bp, Probe sequence
ttaaaaacaatatgcaggagatttc

SEQ ID NO: 262924 - DNA, 25 bp, Probe sequence
atatatgcgttcaaatggacgatat

SEQ ID NO: 262925 - DNA, 25 bp, Probe sequence
atcttcatatgtaaaagtggtgtaa

SEQ ID NO: 262926 - DNA, 25 bp, Probe sequence
atctgagtatcaactattaacgcaa

SEQ ID NO: 262927 - DNA, 25 bp, Probe sequence
agccctacaacgtcattgaacgctt

SEQ ID NO: 262928 - DNA, 25 bp, Probe sequence
acgtcattgaacgcttacaagttga

SEQ ID NO: 262929 - DNA, 25 bp, Probe sequence
actattaacgcaatttaacccagca

SEQ ID NO: 262930 - DNA, 25 bp, Probe sequence
acaacgtcattgaacgcttacaagt

SEQ ID NO: 262931 - DNA, 25 bp, Probe sequence
aaaggtactaaatcattatacagaa

SEQ ID NO: 262932 - DNA, 25 bp, Probe sequence
aaaagagcagaagcaagttgtaaaa

SEQ ID NO: 262933 - DNA, 25 bp, Probe sequence
aatggacgatataagccctacaacg

SEQ ID NO: 262934 - DNA, 25 bp, Probe sequence
caagcaagtattaaacaacgttcag

SEQ ID NO: 262935 - DNA, 25 bp, Probe sequence
cgatataagccctacaacgtcattg

SEQ ID NO: 262936 - DNA, 25 bp, Probe sequence
cgaagaattgtttatattatcgtaa

SEQ ID NO: 262937 - DNA, 25 bp, Probe sequence
cctacaacgtcattgaacgcttaca

SEQ ID NO: 262938 - DNA, 25 bp, Probe sequence
gccctacaacgtcattgaacgctta

SEQ ID NO: 262939 - DNA, 25 bp, Probe sequence
gcgtcgaccacaacatgtgatgaaa

SEQ ID NO: 262940 - DNA, 25 bp, Probe sequence
gaacgcttacaagttgatttgtatc

SEQ ID NO: 262941 - DNA, 25 bp, Probe sequence
gacaataaactatctgagtatcaac

SEQ ID NO: 262942 - DNA, 25 bp, Probe sequence
gagtatcaactattaacgcaattta

SEQ ID NO: 262943 - DNA, 25 bp, Probe sequence
gatctataaataatatggcgttgtt

SEQ ID NO: 262944 - DNA, 25 bp, Probe sequence
gatataagccctacaacgtcattga

SEQ ID NO: 262945 - DNA, 25 bp, Probe sequence
gatttgtatcaagcaagtattaaac

SEQ ID NO: 262946 - DNA, 25 bp, Probe sequence
gtattaaacaacgttcagaacgtca

SEQ ID NO: 262947 - DNA, 25 bp, Probe sequence
gtaaaatatatgcgttcaaatggac

SEQ ID NO: 262948 - DNA, 25 bp, Probe sequence
gtctcatatccgattgaaaaattag

SEQ ID NO: 262949 - DNA, 25 bp, Probe sequence
gtcattgaacgcttacaagttgatt

SEQ ID NO: 262950 - DNA, 25 bp, Probe sequence
gtgatgaaataatgggggtcgtgtc

SEQ ID NO: 262951 - DNA, 25 bp, Probe sequence
taagccctacaacgtcattgaacgc

SEQ ID NO: 262952 - DNA, 25 bp, Probe sequence
taaactatctgagtatcaactatta

SEQ ID NO: 262953 - DNA, 25 bp, Probe sequence
tatggcgttgttgaaaaaggtacta

SEQ ID NO: 262954 - DNA, 25 bp, Probe sequence
tataagccctacaacgtcattgaac

SEQ ID NO: 262955 - DNA, 25 bp, Probe sequence
tattaacgcaatttaacccagcatt

SEQ ID NO: 262956 - DNA, 25 bp, Probe sequence
tattgaaacaaaagcagggttacaa

SEQ ID NO: 262957 - DNA, 25 bp, Probe sequence
ttaagatgtgtgaattccaaattga

SEQ ID NO: 262958 - DNA, 25 bp, Probe sequence
atatagtggataaatcaggtgagat

SEQ ID NO: 262959 - DNA, 25 bp, Probe sequence
atagatgaattcgtcctagagcaat

SEQ ID NO: 262960 - DNA, 25 bp, Probe sequence
agatggagatttctttttaaagtat

SEQ ID NO: 262961 - DNA, 25 bp, Probe sequence
agagcaaaaccacgctttatagatg

SEQ ID NO: 262962 - DNA, 25 bp, Probe sequence
agcaaaaccacgctttatagatgaa

SEQ ID NO: 262963 - DNA, 25 bp, Probe sequence
accacgctttatagatgaattcgtc

SEQ ID NO: 262964 - DNA, 25 bp, Probe sequence
acagaagagttattagccatagcta

SEQ ID NO: 262965 - DNA, 25 bp, Probe sequence
acaatttatggagttttatgagaac

SEQ ID NO: 262966 - DNA, 25 bp, Probe sequence
aaaccacgctttatagatgaattcg

SEQ ID NO: 262967 - DNA, 25 bp, Probe sequence
aaaaccacgctttatagatgaattc

SEQ ID NO: 262968 - DNA, 25 bp, Probe sequence
aatttattctgaggactatccgaaa

SEQ ID NO: 262969 - DNA, 25 bp, Probe sequence
cacgctttatagatgaattcgtcct

SEQ ID NO: 262970 - DNA, 25 bp, Probe sequence
gctttatagatgaattcgtcctaga

SEQ ID NO: 262971 - DNA, 25 bp, Probe sequence
gcaaaaccacgctttatagatgaat

SEQ ID NO: 262972 - DNA, 25 bp, Probe sequence
gaatgattaacaacgggatgcccca

SEQ ID NO: 262973 - DNA, 25 bp, Probe sequence
gagcaaaaccacgctttatagatga

SEQ ID NO: 262974 - DNA, 25 bp, Probe sequence
gagttattagccatagctaaggata

SEQ ID NO: 262975 - DNA, 25 bp, Probe sequence
gatgtgcttgatctagatgaagata

SEQ ID NO: 262976 - DNA, 25 bp, Probe sequence
gatgaagataatgaagtcgatgatg

SEQ ID NO: 262977 - DNA, 25 bp, Probe sequence
gttgagattgaacgtggatagcttt

SEQ ID NO: 262978 - DNA, 25 bp, Probe sequence
gttagatttcttagatttaaagtat

SEQ ID NO: 262979 - DNA, 25 bp, Probe sequence
gttactaatctaaaacaatttatgg

SEQ ID NO: 262980 - DNA, 25 bp, Probe sequence
gtaagttgagattgaacgtggatag

SEQ ID NO: 262981 - DNA, 25 bp, Probe sequence
ggacaaagatggagatttcttttta

SEQ ID NO: 262982 - DNA, 25 bp, Probe sequence
ggagatgtgcttgatctagatgaag

SEQ ID NO: 262983 - DNA, 25 bp, Probe sequence
tcgccatacagtaggaacaagaatg

SEQ ID NO: 262984 - DNA, 25 bp, Probe sequence
tctggacatgaaatttaaacaagtt

SEQ ID NO: 262985 - DNA, 25 bp, Probe sequence
taaaatgttagatttcttagattta

SEQ ID NO: 262986 - DNA, 25 bp, Probe sequence
tagatgaattcgtcctagagcaatt

SEQ ID NO: 262987 - DNA, 25 bp, Probe sequence
tagccatagctaaggataaacaatg

SEQ ID NO: 262988 - DNA, 25 bp, Probe sequence
tattagtcagagtgagattagcaaa

SEQ ID NO: 262989 - DNA, 25 bp, Probe sequence
tattaatttattctgaggactatcc

SEQ ID NO: 262990 - DNA, 25 bp, Probe sequence
ttatagatgaattcgtcctagagca

SEQ ID NO: 262991 - DNA, 25 bp, Probe sequence
ttatgagaacttttattttgatgga

SEQ ID NO: 262992 - DNA, 25 bp, Probe sequence
attgtggaggtgatagaatgagtga

SEQ ID NO: 262993 - DNA, 25 bp, Probe sequence
atattttcgattctttaatacaagg

SEQ ID NO: 262994 - DNA, 25 bp, Probe sequence
atctgtaagattatggtatgaaacc

SEQ ID NO: 262995 - DNA, 25 bp, Probe sequence
atgaatggatggcagacgataacat

SEQ ID NO: 262996 - DNA, 25 bp, Probe sequence
atggtatgaaaccttattagataaa

SEQ ID NO: 262997 - DNA, 25 bp, Probe sequence
atggatggcagacgataacattgat

SEQ ID NO: 262998 - DNA, 25 bp, Probe sequence
atggcagacgataacattgatgatc

SEQ ID NO: 262999 - DNA, 25 bp, Probe sequence
agacgataacattgatgatcatatt

SEQ ID NO: 263000 - DNA, 25 bp, Probe sequence
aatgaatggatggcagacgataaca

SEQ ID NO: 263001 - DNA, 25 bp, Probe sequence
gcagacgataacattgatgatcata

SEQ ID NO: 263002 - DNA, 25 bp, Probe sequence
gaatggatggcagacgataacattg

SEQ ID NO: 263003 - DNA, 25 bp, Probe sequence
gaaaccttattagataaaattgtgg

SEQ ID NO: 263004 - DNA, 25 bp, Probe sequence
gagtgttcagaacaatctgtaagat

SEQ ID NO: 263005 - DNA, 25 bp, Probe sequence
gatggcagacgataacattgatgat

SEQ ID NO: 263006 - DNA, 25 bp, Probe sequence
gatcatattgtaaagaatcacttag

SEQ ID NO: 263007 - DNA, 25 bp, Probe sequence
gataacattgatgatcatattgtaa

SEQ ID NO: 263008 - DNA, 25 bp, Probe sequence
gattctttaatacaaggacgtagtt

SEQ ID NO: 263009 - DNA, 25 bp, Probe sequence
gattatggtatgaaaccttattaga

SEQ ID NO: 263010 - DNA, 25 bp, Probe sequence
gtcttagagtgttcagaacaatctg

SEQ ID NO: 263011 - DNA, 25 bp, Probe sequence
gtgttcagaacaatctgtaagatta

SEQ ID NO: 263012 - DNA, 25 bp, Probe sequence
ggatggcagacgataacattgatga

SEQ ID NO: 263013 - DNA, 25 bp, Probe sequence
ggcagacgataacattgatgatcat

SEQ ID NO: 263014 - DNA, 25 bp, Probe sequence
tggatggcagacgataacattgatg

SEQ ID NO: 263015 - DNA, 25 bp, Probe sequence
tggcagacgataacattgatgatca

SEQ ID NO: 263016 - DNA, 25 bp, Probe sequence
tcgattctttaatacaaggacgtag

SEQ ID NO: 263017 - DNA, 25 bp, Probe sequence
taaagagttttatattttcgattct

SEQ ID NO: 263018 - DNA, 25 bp, Probe sequence
tagataaaattgtggaggtgataga

SEQ ID NO: 263019 - DNA, 25 bp, Probe sequence
tattttcgattctttaatacaagga

SEQ ID NO: 263020 - DNA, 25 bp, Probe sequence
tttcgattctttaatacaaggacgt

SEQ ID NO: 263021 - DNA, 25 bp, Probe sequence
tttatattttcgattctttaataca

SEQ ID NO: 263022 - DNA, 25 bp, Probe sequence
ttttcgattctttaatacaaggacg

SEQ ID NO: 263023 - DNA, 25 bp, Probe sequence
ttatattttcgattctttaatacaa

SEQ ID NO: 263024 - DNA, 25 bp, Probe sequence
ttatggtatgaaaccttattagata

SEQ ID NO: 263025 - DNA, 25 bp, Probe sequence
ttcgattctttaatacaaggacgta

SEQ ID NO: 263026 - DNA, 25 bp, Probe sequence
ataagaacacttaatgtaacacaaa

SEQ ID NO: 263027 - DNA, 25 bp, Probe sequence
atgcggcagtcggtgatgaaacaga

SEQ ID NO: 263028 - DNA, 25 bp, Probe sequence
agataagcatgatattaacgggaat

SEQ ID NO: 263029 - DNA, 25 bp, Probe sequence
agagttactacatgtgcttacgaat

SEQ ID NO: 263030 - DNA, 25 bp, Probe sequence
agcgcacatgtgacagggtgtaggt

SEQ ID NO: 263031 - DNA, 25 bp, Probe sequence
acctagtgatcgtttaaaagctcgt

SEQ ID NO: 263032 - DNA, 25 bp, Probe sequence
acatgtgcttacgaatgcggcagtc

SEQ ID NO: 263033 - DNA, 25 bp, Probe sequence
aaacaagcgcgttttgtgaatgagt

SEQ ID NO: 263034 - DNA, 25 bp, Probe sequence
aacatgttgaactgatagaggtacc

SEQ ID NO: 263035 - DNA, 25 bp, Probe sequence
aagcgcgttttgtgaatgagtatat

SEQ ID NO: 263036 - DNA, 25 bp, Probe sequence
aagatgtatctaacgctaatcctaa

SEQ ID NO: 263037 - DNA, 25 bp, Probe sequence
aagtggcaaagtacaattagtctat

SEQ ID NO: 263038 - DNA, 25 bp, Probe sequence
aataccataagttatttacagataa

SEQ ID NO: 263039 - DNA, 25 bp, Probe sequence
gccacacatcaagcaatatatacaa

SEQ ID NO: 263040 - DNA, 25 bp, Probe sequence
gcgcaaatagcgcacatgtgacagg

SEQ ID NO: 263041 - DNA, 25 bp, Probe sequence
gcttacgaatgcggcagtcggtgat

SEQ ID NO: 263042 - DNA, 25 bp, Probe sequence
gcaggctatagcgcaaatagcgcac

SEQ ID NO: 263043 - DNA, 25 bp, Probe sequence
gaagaagccacacatcaagcaatat

SEQ ID NO: 263044 - DNA, 25 bp, Probe sequence
gatgagaatgtattaaccgcaaaag

SEQ ID NO: 263045 - DNA, 25 bp, Probe sequence
gttgaactgatagaggtaccaataa

SEQ ID NO: 263046 - DNA, 25 bp, Probe sequence
gtttaaaagctcgtgatatgttggg

SEQ ID NO: 263047 - DNA, 25 bp, Probe sequence
gtaggttattgaagaagccacacat

SEQ ID NO: 263048 - DNA, 25 bp, Probe sequence
gtaccaataaaacctagtgatcgtt

SEQ ID NO: 263049 - DNA, 25 bp, Probe sequence
gtgcttacgaatgcggcagtcggtg

SEQ ID NO: 263050 - DNA, 25 bp, Probe sequence
gtgccataaaagcaggctatagcgc

SEQ ID NO: 263051 - DNA, 25 bp, Probe sequence
gtgacagggtgtaggttattgaaga

SEQ ID NO: 263052 - DNA, 25 bp, Probe sequence
gtgagttaacggcaaaacaagcgcg

SEQ ID NO: 263053 - DNA, 25 bp, Probe sequence
gtgatcgtttaaaagctcgtgatat

SEQ ID NO: 263054 - DNA, 25 bp, Probe sequence
ggcagtcggtgatgaaacagaaacg

SEQ ID NO: 263055 - DNA, 25 bp, Probe sequence
aaccgcaaaagagttactacatgtg

SEQ ID NO: 263056 - DNA, 25 bp, Probe sequence
tactacatgtgcttacgaatgcggc

SEQ ID NO: 263057 - DNA, 25 bp, Probe sequence
tacgaatgcggcagtcggtgatgaa

SEQ ID NO: 263058 - DNA, 25 bp, Probe sequence
tagtctataatgaacatgttgaact

SEQ ID NO: 263059 - DNA, 25 bp, Probe sequence
ttaatgtaacacaaagtgccataaa

SEQ ID NO: 263060 - DNA, 25 bp, Probe sequence
attccacactgatagaggcaaagaa

SEQ ID NO: 263061 - DNA, 25 bp, Probe sequence
atcaaactattccacactgatagag

SEQ ID NO: 263062 - DNA, 25 bp, Probe sequence
agggtcatactgtatcaagacgaaa

SEQ ID NO: 263063 - DNA, 25 bp, Probe sequence
agacgaaagataggtcgtatcatga

SEQ ID NO: 263064 - DNA, 25 bp, Probe sequence
actattccacactgatagaggcaaa

SEQ ID NO: 263065 - DNA, 25 bp, Probe sequence
acaaatcaaactattccacactgat

SEQ ID NO: 263066 - DNA, 25 bp, Probe sequence
acaagggtcatactgtatcaagacg

SEQ ID NO: 263067 - DNA, 25 bp, Probe sequence
aaatcaaactattccacactgatag

SEQ ID NO: 263068 - DNA, 25 bp, Probe sequence
aaactattccacactgatagaggca

SEQ ID NO: 263069 - DNA, 25 bp, Probe sequence
aacaaatcaaactattccacactga

SEQ ID NO: 263070 - DNA, 25 bp, Probe sequence
aactattccacactgatagaggcaa

SEQ ID NO: 263071 - DNA, 25 bp, Probe sequence
aagggtcatactgtatcaagacgaa

SEQ ID NO: 263072 - DNA, 25 bp, Probe sequence
aatcaaactattccacactgataga

SEQ ID NO: 263073 - DNA, 25 bp, Probe sequence
caagggtcatactgtatcaagacga

SEQ ID NO: 263074 - DNA, 25 bp, Probe sequence
caaactattccacactgatagaggc

SEQ ID NO: 263075 - DNA, 25 bp, Probe sequence
caaatcaaactattccacactgata

SEQ ID NO: 263076 - DNA, 25 bp, Probe sequence
cacactgatagaggcaaagaatttg

SEQ ID NO: 263077 - DNA, 25 bp, Probe sequence
catttaaaatcaaacgttcattaag

SEQ ID NO: 263078 - DNA, 25 bp, Probe sequence
ctattccacactgatagaggcaaag

SEQ ID NO: 263079 - DNA, 25 bp, Probe sequence
gaacaaatcaaactattccacactg

SEQ ID NO: 263080 - DNA, 25 bp, Probe sequence
gaaagcaatgaaaaccgaatttgta

SEQ ID NO: 263081 - DNA, 25 bp, Probe sequence
gacaagggtcatactgtatcaagac

SEQ ID NO: 263082 - DNA, 25 bp, Probe sequence
gaggcaaagaatttgataatcattt

SEQ ID NO: 263083 - DNA, 25 bp, Probe sequence
gatgaagtcctagaaacatttaaaa

SEQ ID NO: 263084 - DNA, 25 bp, Probe sequence
gtcatactgtatcaagacgaaagat

SEQ ID NO: 263085 - DNA, 25 bp, Probe sequence
gggtcatactgtatcaagacgaaag

SEQ ID NO: 263086 - DNA, 25 bp, Probe sequence
ggtcgtatcatgaaaaaatataatc

SEQ ID NO: 263087 - DNA, 25 bp, Probe sequence
ggtcatactgtatcaagacgaaaga

SEQ ID NO: 263088 - DNA, 25 bp, Probe sequence
tgacaagggtcatactgtatcaaga

SEQ ID NO: 263089 - DNA, 25 bp, Probe sequence
tgaacaaatcaaactattccacact

SEQ ID NO: 263090 - DNA, 25 bp, Probe sequence
tccacactgatagaggcaaagaatt

SEQ ID NO: 263091 - DNA, 25 bp, Probe sequence
tcaaactattccacactgatagagg

SEQ ID NO: 263092 - DNA, 25 bp, Probe sequence
tattccacactgatagaggcaaaga

SEQ ID NO: 263093 - DNA, 25 bp, Probe sequence
ttgaacaaatcaaactattccacac

SEQ ID NO: 263094 - DNA, 25 bp, Probe sequence
gcgtatataaagggcgccccttact

SEQ ID NO: 263095 - DNA, 25 bp, Probe sequence
atattacaagacaaacagtttatag

SEQ ID NO: 263096 - DNA, 25 bp, Probe sequence
atcatcgcgtggtggaaatgttaga

SEQ ID NO: 263097 - DNA, 25 bp, Probe sequence
atcgcgtggtggaaatgttagaaga

SEQ ID NO: 263098 - DNA, 25 bp, Probe sequence
atgcgaaagatcctcaaaaacgtgt

SEQ ID NO: 263099 - DNA, 25 bp, Probe sequence
atgttagaagaagggcaagcaatta

SEQ ID NO: 263100 - DNA, 25 bp, Probe sequence
agatcctcaaaaacgtgttatttat

SEQ ID NO: 263101 - DNA, 25 bp, Probe sequence
agaagggcaagcaattagtaaaatt

SEQ ID NO: 263102 - DNA, 25 bp, Probe sequence
acgtgttatttatcatcgcgtggtg

SEQ ID NO: 263103 - DNA, 25 bp, Probe sequence
accaaatgcgaaagatcctcaaaaa

SEQ ID NO: 263104 - DNA, 25 bp, Probe sequence
aaaacgtgttatttatcatcgcgtg

SEQ ID NO: 263105 - DNA, 25 bp, Probe sequence
aacgtgttatttatcatcgcgtggt

SEQ ID NO: 263106 - DNA, 25 bp, Probe sequence
aatgcgaaagatcctcaaaaacgtg

SEQ ID NO: 263107 - DNA, 25 bp, Probe sequence
aattgccaaagaagttaatattaca

SEQ ID NO: 263108 - DNA, 25 bp, Probe sequence
caaatgcgaaagatcctcaaaaacg

SEQ ID NO: 263109 - DNA, 25 bp, Probe sequence
caaaaacgtgttatttatcatcgcg

SEQ ID NO: 263110 - DNA, 25 bp, Probe sequence
caccaaatgcgaaagatcctcaaaa

SEQ ID NO: 263111 - DNA, 25 bp, Probe sequence
cttactttattcaccaaatgcgaaa

SEQ ID NO: 263112 - DNA, 25 bp, Probe sequence
cgtgttatttatcatcgcgtggtgg

SEQ ID NO: 263113 - DNA, 25 bp, Probe sequence
gcgaaagatcctcaaaaacgtgtta

SEQ ID NO: 263114 - DNA, 25 bp, Probe sequence
cccttactttattcaccaaatgcga

SEQ ID NO: 263115 - DNA, 25 bp, Probe sequence
ccccttactttattcaccaaatgcg

SEQ ID NO: 263116 - DNA, 25 bp, Probe sequence
gcgtggtggaaatgttagaagaagg

SEQ ID NO: 263117 - DNA, 25 bp, Probe sequence
gaaagatcctcaaaaacgtgttatt

SEQ ID NO: 263118 - DNA, 25 bp, Probe sequence
gatcctcaaaaacgtgttatttatc

SEQ ID NO: 263119 - DNA, 25 bp, Probe sequence
gttgcgaaggaaaaaggcgtatata

SEQ ID NO: 263120 - DNA, 25 bp, Probe sequence
gttatttatcatcgcgtggtggaaa

SEQ ID NO: 263121 - DNA, 25 bp, Probe sequence
gtgttatttatcatcgcgtggtgga

SEQ ID NO: 263122 - DNA, 25 bp, Probe sequence
ggaaatgttagaagaagggcaagca

SEQ ID NO: 263123 - DNA, 25 bp, Probe sequence
tgttatttatcatcgcgtggtggaa

SEQ ID NO: 263124 - DNA, 25 bp, Probe sequence
tcaccaaatgcgaaagatcctcaaa

SEQ ID NO: 263125 - DNA, 25 bp, Probe sequence
tcaagttgcgaaggaaaaaggcgta

SEQ ID NO: 263126 - DNA, 25 bp, Probe sequence
tttatcatcgcgtggtggaaatgtt

SEQ ID NO: 263127 - DNA, 25 bp, Probe sequence
tatttatcatcgcgtggtggaaatg

SEQ ID NO: 263128 - DNA, 25 bp, Probe sequence
atataaagaactgacgcatggccgt

SEQ ID NO: 263129 - DNA, 25 bp, Probe sequence
agaactgacgcatggccgtgatgtc

SEQ ID NO: 263130 - DNA, 25 bp, Probe sequence
acaggtgtgatgacagcagaaagtc

SEQ ID NO: 263131 - DNA, 25 bp, Probe sequence
aaagtatttctaattggcgacgata

SEQ ID NO: 263132 - DNA, 25 bp, Probe sequence
aactgacgcatggccgtgatgtctt

SEQ ID NO: 263133 - DNA, 25 bp, Probe sequence
aagttggatgaaacacaacgcaaat

SEQ ID NO: 263134 - DNA, 25 bp, Probe sequence
aaggcgcgtcagataaaggtagaat

SEQ ID NO: 263135 - DNA, 25 bp, Probe sequence
aatgtgagatccgtgtttggctatg

SEQ ID NO: 263136 - DNA, 25 bp, Probe sequence
aatagatactaaaggcggcatatat

SEQ ID NO: 263137 - DNA, 25 bp, Probe sequence
cgcatggccgtgatgtctttgcagt

SEQ ID NO: 263138 - DNA, 25 bp, Probe sequence
gaagattattatgggtctaacgttt

SEQ ID NO: 263139 - DNA, 25 bp, Probe sequence
gaaagctatgaatcaacaaacatta

SEQ ID NO: 263140 - DNA, 25 bp, Probe sequence
gaaagtcaaactgtaaacgcgaaag

SEQ ID NO: 263141 - DNA, 25 bp, Probe sequence
gatgtgctggatagtaagcagatta

SEQ ID NO: 263142 - DNA, 25 bp, Probe sequence
gatccgtgtttggctatgtaagtca

SEQ ID NO: 263143 - DNA, 25 bp, Probe sequence
gatcctaaagatggcttttcgataa

SEQ ID NO: 263144 - DNA, 25 bp, Probe sequence
gatcgtatgtttgatgtgctggata

SEQ ID NO: 263145 - DNA, 25 bp, Probe sequence
gataaaagagttgttctttattcaa

SEQ ID NO: 263146 - DNA, 25 bp, Probe sequence
gttgatcctaaagatggcttttcga

SEQ ID NO: 263147 - DNA, 25 bp, Probe sequence
gattactattctcaagaaagctatg

SEQ ID NO: 263148 - DNA, 25 bp, Probe sequence
gtaaacgcgaaagtaaagttggatg

SEQ ID NO: 263149 - DNA, 25 bp, Probe sequence
gttttgatcgtatgtttgatgtgct

SEQ ID NO: 263150 - DNA, 25 bp, Probe sequence
gtaagtcatccgggactgcaagtta

SEQ ID NO: 263151 - DNA, 25 bp, Probe sequence
gtcatccgggactgcaagttaaaaa

SEQ ID NO: 263152 - DNA, 25 bp, Probe sequence
gtgagatccgtgtttggctatgtaa

SEQ ID NO: 263153 - DNA, 25 bp, Probe sequence
gtgtttggctatgtaagtcatccgg

SEQ ID NO: 263154 - DNA, 25 bp, Probe sequence
ggctatgtaagtcatccgggactgc

SEQ ID NO: 263155 - DNA, 25 bp, Probe sequence
tgacgcatggccgtgatgtctttgc

SEQ ID NO: 263156 - DNA, 25 bp, Probe sequence
tactaaaggcggcatatatagcgtt

SEQ ID NO: 263157 - DNA, 25 bp, Probe sequence
tagattgtataaaggcgcgtcagat

SEQ ID NO: 263158 - DNA, 25 bp, Probe sequence
tatgctaaaagattactattctcaa

SEQ ID NO: 263159 - DNA, 25 bp, Probe sequence
tttggctatgtaagtcatccgggac

SEQ ID NO: 263160 - DNA, 25 bp, Probe sequence
ttaacaacaggtgtgatgacagcag

SEQ ID NO: 263161 - DNA, 25 bp, Probe sequence
ttaacagcaatagctaaagcaacat

SEQ ID NO: 263162 - DNA, 25 bp, Probe sequence
attgcctggagatgagtaccgtaaa

SEQ ID NO: 263163 - DNA, 25 bp, Probe sequence
attattgcctggagatgagtaccgt

SEQ ID NO: 263164 - DNA, 25 bp, Probe sequence
atatcaacagcgaagacatacgggc

SEQ ID NO: 263165 - DNA, 25 bp, Probe sequence
atacgggcttagatgtgttttttgt

SEQ ID NO: 263166 - DNA, 25 bp, Probe sequence
ctacactggaaactttaaggaaatg

SEQ ID NO: 263167 - DNA, 25 bp, Probe sequence
agatggtagcttttataaccttgat

SEQ ID NO: 263168 - DNA, 25 bp, Probe sequence
aactttaacaacagaggcccattca

SEQ ID NO: 263169 - DNA, 25 bp, Probe sequence
acagcgaagacatacgggcttagat

SEQ ID NO: 263170 - DNA, 25 bp, Probe sequence
aaattcaaacatatgggggaagtca

SEQ ID NO: 263171 - DNA, 25 bp, Probe sequence
aaattagtctgaaagatggtagctt

SEQ ID NO: 263172 - DNA, 25 bp, Probe sequence
aaacattaatgctttgagacatggt

SEQ ID NO: 263173 - DNA, 25 bp, Probe sequence
aagcacgacatatcatatactgttg

SEQ ID NO: 263174 - DNA, 25 bp, Probe sequence
caacagaggcccattcaggtcatgc

SEQ ID NO: 263175 - DNA, 25 bp, Probe sequence
catctaattgaaaaatacggtcttt

SEQ ID NO: 263176 - DNA, 25 bp, Probe sequence
cggctttgtcagcacaccaagatta

SEQ ID NO: 263177 - DNA, 25 bp, Probe sequence
cgacatatcatatactgttggtggt

SEQ ID NO: 263178 - DNA, 25 bp, Probe sequence
gaagcattacaccgatactacactg

SEQ ID NO: 263179 - DNA, 25 bp, Probe sequence
gaaagaagagacaagcacgacatat

SEQ ID NO: 263180 - DNA, 25 bp, Probe sequence
gaaattgacagcattagcaaaagta

SEQ ID NO: 263181 - DNA, 25 bp, Probe sequence
gacaaagaagcattacaccgatact

SEQ ID NO: 263182 - DNA, 25 bp, Probe sequence
gaccaataaaacatccggctttgtc

SEQ ID NO: 263183 - DNA, 25 bp, Probe sequence
gagacaagcacgacatatcatatac

SEQ ID NO: 263184 - DNA, 25 bp, Probe sequence
gagtaccgtaaatatcaacagcgaa

SEQ ID NO: 263185 - DNA, 25 bp, Probe sequence
gatggtaggattaaaattagtctga

SEQ ID NO: 263186 - DNA, 25 bp, Probe sequence
gatgtgttttttgttcaagaaagaa

SEQ ID NO: 263187 - DNA, 25 bp, Probe sequence
gttggtggtgtaacaaagaccaata

SEQ ID NO: 263188 - DNA, 25 bp, Probe sequence
gtaacattagcattagggattttaa

SEQ ID NO: 263189 - DNA, 25 bp, Probe sequence
gtcagcacaccaagattaaatgtta

SEQ ID NO: 263190 - DNA, 25 bp, Probe sequence
gggcttagatgtgttttttgttcaa

SEQ ID NO: 263191 - DNA, 25 bp, Probe sequence
ggatgaagactcaagtattattgcc

SEQ ID NO: 263192 - DNA, 25 bp, Probe sequence
ggcccattcaggtcatgctaaacaa

SEQ ID NO: 263193 - DNA, 25 bp, Probe sequence
taacaacagaggcccattcaggtca

SEQ ID NO: 263194 - DNA, 25 bp, Probe sequence
taaaacatccggctttgtcagcaca

SEQ ID NO: 263195 - DNA, 25 bp, Probe sequence
tacggtctttataaaacactctcaa

SEQ ID NO: 263196 - DNA, 25 bp, Probe sequence
agacgtttggtgtggagaaaatctt

SEQ ID NO: 263197 - DNA, 25 bp, Probe sequence
attattgaaactgtgaattatttaa

SEQ ID NO: 263198 - DNA, 25 bp, Probe sequence
atctattgatcgtttaggacgtaac

SEQ ID NO: 263199 - DNA, 25 bp, Probe sequence
atgggagatcgattcgttgtggaat

SEQ ID NO: 263200 - DNA, 25 bp, Probe sequence
agtcagtggaaaatagacctgtatt

SEQ ID NO: 263201 - DNA, 25 bp, Probe sequence
agaaggcaaagcgattagtaagatt

SEQ ID NO: 263202 - DNA, 25 bp, Probe sequence
agcactcaattttgtcagaatggga

SEQ ID NO: 263203 - DNA, 25 bp, Probe sequence
acagtcgggaaagtcagtggaaaat

SEQ ID NO: 263204 - DNA, 25 bp, Probe sequence
aaatctttacagagaaacagtcggg

SEQ ID NO: 263205 - DNA, 25 bp, Probe sequence
aaagacgttcagttaatgattacca

SEQ ID NO: 263206 - DNA, 25 bp, Probe sequence
cactcaattttgtcagaatgggaga

SEQ ID NO: 263207 - DNA, 25 bp, Probe sequence
gcgaaagaagttaatatcacaagac

SEQ ID NO: 263208 - DNA, 25 bp, Probe sequence
gaatgggagatcgattcgttgtgga

SEQ ID NO: 263209 - DNA, 25 bp, Probe sequence
gaatgaagtaattggcaatccatta

SEQ ID NO: 263210 - DNA, 25 bp, Probe sequence
gaagcactcaattttgtcagaatgg

SEQ ID NO: 263211 - DNA, 25 bp, Probe sequence
gaaacagtcgggaaagtcagtggaa

SEQ ID NO: 263212 - DNA, 25 bp, Probe sequence
gagaaacagtcgggaaagtcagtgg

SEQ ID NO: 263213 - DNA, 25 bp, Probe sequence
gacgttcagttaatgattaccagct

SEQ ID NO: 263214 - DNA, 25 bp, Probe sequence
gacctgtatttcaagaagcactcaa

SEQ ID NO: 263215 - DNA, 25 bp, Probe sequence
gatcgtttaggacgtaactatgatg

SEQ ID NO: 263216 - DNA, 25 bp, Probe sequence
gattataggttatgcgagagtatca

SEQ ID NO: 263217 - DNA, 25 bp, Probe sequence
gttgtggaatctattgatcgtttag

SEQ ID NO: 263218 - DNA, 25 bp, Probe sequence
gttcagttaatgattaccagcttac

SEQ ID NO: 263219 - DNA, 25 bp, Probe sequence
gtttaggacgtaactatgatgaaat

SEQ ID NO: 263220 - DNA, 25 bp, Probe sequence
gtggaatctattgatcgtttaggac

SEQ ID NO: 263221 - DNA, 25 bp, Probe sequence
ggtgtggagaaaatctttacagaga

SEQ ID NO: 263222 - DNA, 25 bp, Probe sequence
ggataatttaaagacgtttggtgtg

SEQ ID NO: 263223 - DNA, 25 bp, Probe sequence
ggagatcgattcgttgtggaatcta

SEQ ID NO: 263224 - DNA, 25 bp, Probe sequence
ggaatctattgatcgtttaggacgt

SEQ ID NO: 263225 - DNA, 25 bp, Probe sequence
tcagttaatgattaccagcttacct

SEQ ID NO: 263226 - DNA, 25 bp, Probe sequence
tcaagaagcactcaattttgtcaga

SEQ ID NO: 263227 - DNA, 25 bp, Probe sequence
taaagacccacagaaacgtgttatt

SEQ ID NO: 263228 - DNA, 25 bp, Probe sequence
tagacctgtatttcaagaagcactc

SEQ ID NO: 263229 - DNA, 25 bp, Probe sequence
ttcgttgtggaatctattgatcgtt

SEQ ID NO: 263230 - DNA, 25 bp, Probe sequence
atatccaattgaaaaactagttatc

SEQ ID NO: 263231 - DNA, 25 bp, Probe sequence
atctataagtaatatggtgttgttg

SEQ ID NO: 263232 - DNA, 25 bp, Probe sequence
atcgatctataagtaatatggtgtt

SEQ ID NO: 263233 - DNA, 25 bp, Probe sequence
atccaattgaaaaactagttatcaa

SEQ ID NO: 263234 - DNA, 25 bp, Probe sequence
acaaaggcaagattacaaaactata

SEQ ID NO: 263235 - DNA, 25 bp, Probe sequence
aaatcgatctataagtaatatggtg

SEQ ID NO: 263236 - DNA, 25 bp, Probe sequence
aaaaatcgatctataagtaatatgg

SEQ ID NO: 263237 - DNA, 25 bp, Probe sequence
aaaatcgatctataagtaatatggt

SEQ ID NO: 263238 - DNA, 25 bp, Probe sequence
aacaaaggcaagattacaaaactat

SEQ ID NO: 263239 - DNA, 25 bp, Probe sequence
aatcgatctataagtaatatggtgt

SEQ ID NO: 263240 - DNA, 25 bp, Probe sequence
caaaggcaagattacaaaactataa

SEQ ID NO: 263241 - DNA, 25 bp, Probe sequence
catatccaattgaaaaactagttat

SEQ ID NO: 263242 - DNA, 25 bp, Probe sequence
ctataagtaatatggtgttgttgaa

SEQ ID NO: 263243 - DNA, 25 bp, Probe sequence
ctcatatccaattgaaaaactagtt

SEQ ID NO: 263244 - DNA, 25 bp, Probe sequence
cgatctataagtaatatggtgttgt

SEQ ID NO: 263245 - DNA, 25 bp, Probe sequence
gaaacaaaggcaagattacaaaact

SEQ ID NO: 263246 - DNA, 25 bp, Probe sequence
gatctataagtaatatggtgttgtt

SEQ ID NO: 263247 - DNA, 25 bp, Probe sequence
gtctcatatccaattgaaaaactag

SEQ ID NO: 263248 - DNA, 25 bp, Probe sequence
tgaaacaaaggcaagattacaaaac

SEQ ID NO: 263249 - DNA, 25 bp, Probe sequence
tgaaaatagcaagattgcacgagta

SEQ ID NO: 263250 - DNA, 25 bp, Probe sequence
tccaattgaaaaactagttatcaaa

SEQ ID NO: 263251 - DNA, 25 bp, Probe sequence
tcgatctataagtaatatggtgttg

SEQ ID NO: 263252 - DNA, 25 bp, Probe sequence
tctataagtaatatggtgttgttga

SEQ ID NO: 263253 - DNA, 25 bp, Probe sequence
tctcatatccaattgaaaaactagt

SEQ ID NO: 263254 - DNA, 25 bp, Probe sequence
tcatatccaattgaaaaactagtta

SEQ ID NO: 263255 - DNA, 25 bp, Probe sequence
taaaaatcgatctataagtaatatg

SEQ ID NO: 263256 - DNA, 25 bp, Probe sequence
tatccaattgaaaaactagttatca

SEQ ID NO: 263257 - DNA, 25 bp, Probe sequence
tataagtaatatggtgttgttgaaa

SEQ ID NO: 263258 - DNA, 25 bp, Probe sequence
attttaaagcaagcagcgttgatca

SEQ ID NO: 263259 - DNA, 25 bp, Probe sequence
atttcatttgattatgacaagagaa

SEQ ID NO: 263260 - DNA, 25 bp, Probe sequence
atattttaaagcaagcagcgttgat

SEQ ID NO: 263261 - DNA, 25 bp, Probe sequence
agcaagcagcgttgatcatgggacg

SEQ ID NO: 263262 - DNA, 25 bp, Probe sequence
agcagcgttgatcatgggacgaaaa

SEQ ID NO: 263263 - DNA, 25 bp, Probe sequence
agcgttgatcatgggacgaaaatag

SEQ ID NO: 263264 - DNA, 25 bp, Probe sequence
aaagcaagcagcgttgatcatggga

SEQ ID NO: 263265 - DNA, 25 bp, Probe sequence
aagcaagcagcgttgatcatgggac

SEQ ID NO: 263266 - DNA, 25 bp, Probe sequence
aagcagcgttgatcatgggacgaaa

SEQ ID NO: 263267 - DNA, 25 bp, Probe sequence
aatttcatttgattatgacaagaga

SEQ ID NO: 263268 - DNA, 25 bp, Probe sequence
caagcagcgttgatcatgggacgaa

SEQ ID NO: 263269 - DNA, 25 bp, Probe sequence
cagcgttgatcatgggacgaaaata

SEQ ID NO: 263270 - DNA, 25 bp, Probe sequence
gcagcgttgatcatgggacgaaaat

SEQ ID NO: 263271 - DNA, 25 bp, Probe sequence
gcaagcagcgttgatcatgggacga

SEQ ID NO: 263272 - DNA, 25 bp, Probe sequence
gaatttcatttgattatgacaagag

SEQ ID NO: 263273 - DNA, 25 bp, Probe sequence
gtggaatttcatttgattatgacaa

SEQ ID NO: 263274 - DNA, 25 bp, Probe sequence
ggaatttcatttgattatgacaaga

SEQ ID NO: 263275 - DNA, 25 bp, Probe sequence
tggaatttcatttgattatgacaag

SEQ ID NO: 263276 - DNA, 25 bp, Probe sequence
taaagcaagcagcgttgatcatggg

SEQ ID NO: 263277 - DNA, 25 bp, Probe sequence
tattttaaagcaagcagcgttgatc

SEQ ID NO: 263278 - DNA, 25 bp, Probe sequence
tttaaagcaagcagcgttgatcatg

SEQ ID NO: 263279 - DNA, 25 bp, Probe sequence
tttcatttgattatgacaagagaaa

SEQ ID NO: 263280 - DNA, 25 bp, Probe sequence
ttttaaagcaagcagcgttgatcat

SEQ ID NO: 263281 - DNA, 25 bp, Probe sequence
ttaaagcaagcagcgttgatcatgg

SEQ ID NO: 263282 - DNA, 25 bp, Probe sequence
ttcatttgattatgacaagagaaag

SEQ ID NO: 263283 - DNA, 25 bp, Probe sequence
attccagactttgccgaagcaacaa

SEQ ID NO: 263284 - DNA, 25 bp, Probe sequence
atattaattccagactttgccgaag

SEQ ID NO: 263285 - DNA, 25 bp, Probe sequence
ataatgcattagtatcgccgtatcc

SEQ ID NO: 263286 - DNA, 25 bp, Probe sequence
atgcattagtatcgccgtatcctgg

SEQ ID NO: 263287 - DNA, 25 bp, Probe sequence
atcgccgtatcctggtgctaaagaa

SEQ ID NO: 263288 - DNA, 25 bp, Probe sequence
atggcgactgagaaagatgtaaatg

SEQ ID NO: 263289 - DNA, 25 bp, Probe sequence
aggagcgattacaatggcgactgag

SEQ ID NO: 263290 - DNA, 25 bp, Probe sequence
aaagtgcacgtcatcaatttcaaga

SEQ ID NO: 263291 - DNA, 25 bp, Probe sequence
aaaactgaaggagcgattacaatgg

SEQ ID NO: 263292 - DNA, 25 bp, Probe sequence
aaaagtgcacgtcatcaatttcaag

SEQ ID NO: 263293 - DNA, 25 bp, Probe sequence
aatgcattagtatcgccgtatcctg

SEQ ID NO: 263294 - DNA, 25 bp, Probe sequence
cagactttgccgaagcaacaaatat

SEQ ID NO: 263295 - DNA, 25 bp, Probe sequence
catcaatttcaagataatgcattag

SEQ ID NO: 263296 - DNA, 25 bp, Probe sequence
cattagtatcgccgtatcctggtgc

SEQ ID NO: 263297 - DNA, 25 bp, Probe sequence
cgtatcctggtgctaaagaaatgat

SEQ ID NO: 263298 - DNA, 25 bp, Probe sequence
gccgtatcctggtgctaaagaaatg

SEQ ID NO: 263299 - DNA, 25 bp, Probe sequence
gcgattacaatggcgactgagaaag

SEQ ID NO: 263300 - DNA, 25 bp, Probe sequence
gcattagtatcgccgtatcctggtg

SEQ ID NO: 263301 - DNA, 25 bp, Probe sequence
gaattcaaatgctgttaaaactaga

SEQ ID NO: 263302 - DNA, 25 bp, Probe sequence
gaaggagcgattacaatggcgactg

SEQ ID NO: 263303 - DNA, 25 bp, Probe sequence
gagcgattacaatggcgactgagaa

SEQ ID NO: 263304 - DNA, 25 bp, Probe sequence
gattacaatggcgactgagaaagat

SEQ ID NO: 263305 - DNA, 25 bp, Probe sequence
ggagcgattacaatggcgactgaga

SEQ ID NO: 263306 - DNA, 25 bp, Probe sequence
tgcattagtatcgccgtatcctggt

SEQ ID NO: 263307 - DNA, 25 bp, Probe sequence
tgccgaagcaacaaatattactaat

SEQ ID NO: 263308 - DNA, 25 bp, Probe sequence
tccagactttgccgaagcaacaaat

SEQ ID NO: 263309 - DNA, 25 bp, Probe sequence
tcgccgtatcctggtgctaaagaaa

SEQ ID NO: 263310 - DNA, 25 bp, Probe sequence
tcatgtgaattcaaatgctgttaaa

SEQ ID NO: 263311 - DNA, 25 bp, Probe sequence
taattccagactttgccgaagcaac

SEQ ID NO: 263312 - DNA, 25 bp, Probe sequence
taatgcattagtatcgccgtatcct

SEQ ID NO: 263313 - DNA, 25 bp, Probe sequence
tatcgccgtatcctggtgctaaaga

SEQ ID NO: 263314 - DNA, 25 bp, Probe sequence
tattactaatttatttgagtgcata

SEQ ID NO: 263315 - DNA, 25 bp, Probe sequence
tattaattccagactttgccgaagc

SEQ ID NO: 263316 - DNA, 25 bp, Probe sequence
tattgtttattatgatggtgtggtt

SEQ ID NO: 263317 - DNA, 25 bp, Probe sequence
attcagccaaatatcaattaacgaa

SEQ ID NO: 263318 - DNA, 25 bp, Probe sequence
atttactttagtgatagcctacatc

SEQ ID NO: 263319 - DNA, 25 bp, Probe sequence
atagcctacatcttgaaccaagtga

SEQ ID NO: 263320 - DNA, 25 bp, Probe sequence
agtgatagcctacatcttgaaccaa

SEQ ID NO: 263321 - DNA, 25 bp, Probe sequence
agtacaaagagggagatatttcata

SEQ ID NO: 263322 - DNA, 25 bp, Probe sequence
agcctacatcttgaaccaagtgagg

SEQ ID NO: 263323 - DNA, 25 bp, Probe sequence
actttagtgatagcctacatcttga

SEQ ID NO: 263324 - DNA, 25 bp, Probe sequence
aaagttttgagaagacattgagtat

SEQ ID NO: 263325 - DNA, 25 bp, Probe sequence
aaaagttttgagaagacattgagta

SEQ ID NO: 263326 - DNA, 25 bp, Probe sequence
aagatatgaacgtaaaaggtatggt

SEQ ID NO: 263327 - DNA, 25 bp, Probe sequence
aagtacaaagagggagatatttcat

SEQ ID NO: 263328 - DNA, 25 bp, Probe sequence
cagccaaatatcaattaacgaatga

SEQ ID NO: 263329 - DNA, 25 bp, Probe sequence
ctttagtgatagcctacatcttgaa

SEQ ID NO: 263330 - DNA, 25 bp, Probe sequence
ctaggtattaatcttctgtttttag

SEQ ID NO: 263331 - DNA, 25 bp, Probe sequence
gccaaatatcaattaacgaatgatg

SEQ ID NO: 263332 - DNA, 25 bp, Probe sequence
gctaggtattaatcttctgttttta

SEQ ID NO: 263333 - DNA, 25 bp, Probe sequence
gatagcctacatcttgaaccaagtg

SEQ ID NO: 263334 - DNA, 25 bp, Probe sequence
gatatgaacgtaaaaggtatggttt

SEQ ID NO: 263335 - DNA, 25 bp, Probe sequence
gttttgagaagacattgagtatgta

SEQ ID NO: 263336 - DNA, 25 bp, Probe sequence
gtacaaagagggagatatttcatat

SEQ ID NO: 263337 - DNA, 25 bp, Probe sequence
gtcgaagtacaaagagggagatatt

SEQ ID NO: 263338 - DNA, 25 bp, Probe sequence
gtgatagcctacatcttgaaccaag

SEQ ID NO: 263339 - DNA, 25 bp, Probe sequence
tgatagcctacatcttgaaccaagt

SEQ ID NO: 263340 - DNA, 25 bp, Probe sequence
tcagccaaatatcaattaacgaatg

SEQ ID NO: 263341 - DNA, 25 bp, Probe sequence
tactttagtgatagcctacatcttg

SEQ ID NO: 263342 - DNA, 25 bp, Probe sequence
tagcctacatcttgaaccaagtgag

SEQ ID NO: 263343 - DNA, 25 bp, Probe sequence
tagtgatagcctacatcttgaacca

SEQ ID NO: 263344 - DNA, 25 bp, Probe sequence
tagtgctaggtattaatcttctgtt

SEQ ID NO: 263345 - DNA, 25 bp, Probe sequence
taggtattaatcttctgtttttagt

SEQ ID NO: 263346 - DNA, 25 bp, Probe sequence
tttactttagtgatagcctacatct

SEQ ID NO: 263347 - DNA, 25 bp, Probe sequence
tttagtgatagcctacatcttgaac

SEQ ID NO: 263348 - DNA, 25 bp, Probe sequence
ttagtgatagcctacatcttgaacc

SEQ ID NO: 263349 - DNA, 25 bp, Probe sequence
ttactttagtgatagcctacatctt

SEQ ID NO: 263350 - DNA, 25 bp, Probe sequence
ttcagccaaatatcaattaacgaat

SEQ ID NO: 263351 - DNA, 25 bp, Probe sequence
attatactactatactagtgtatta

SEQ ID NO: 263352 - DNA, 25 bp, Probe sequence
atagatgatgaaggtggagaagtgt

SEQ ID NO: 263353 - DNA, 25 bp, Probe sequence
atcagaatttatggactcagcgtat

SEQ ID NO: 263354 - DNA, 25 bp, Probe sequence
atggactcagcgtatgagttgtata

SEQ ID NO: 263355 - DNA, 25 bp, Probe sequence
agtgttctactattacacagaacct

SEQ ID NO: 263356 - DNA, 25 bp, Probe sequence
agaaggatatgaaccatggacatca

SEQ ID NO: 263357 - DNA, 25 bp, Probe sequence
actattacacagaacctggaagcaa

SEQ ID NO: 263358 - DNA, 25 bp, Probe sequence
acagagtttgatcaattgggccgtc

SEQ ID NO: 263359 - DNA, 25 bp, Probe sequence
acacagaacctggaagcaatgaatt

SEQ ID NO: 263360 - DNA, 25 bp, Probe sequence
cagaatttatggactcagcgtatga

SEQ ID NO: 263361 - DNA, 25 bp, Probe sequence
cagagtttgatcaattgggccgtca

SEQ ID NO: 263362 - DNA, 25 bp, Probe sequence
catcatgcgaatttgattttacaaa

SEQ ID NO: 263363 - DNA, 25 bp, Probe sequence
gaaggtggagaagtgttctactatt

SEQ ID NO: 263364 - DNA, 25 bp, Probe sequence
gaaggtgaattaaaagtttcatttg

SEQ ID NO: 263365 - DNA, 25 bp, Probe sequence
gaaccatggacatcatgcgaatttg

SEQ ID NO: 263366 - DNA, 25 bp, Probe sequence
gaagcaatgaattatactactatac

SEQ ID NO: 263367 - DNA, 25 bp, Probe sequence
gaacctggaagcaatgaattatact

SEQ ID NO: 263368 - DNA, 25 bp, Probe sequence
gagtttgatcaattgggccgtcaaa

SEQ ID NO: 263369 - DNA, 25 bp, Probe sequence
gatcaattgggccgtcaaaattatt

SEQ ID NO: 263370 - DNA, 25 bp, Probe sequence
gatatgaaccatggacatcatgcga

SEQ ID NO: 263371 - DNA, 25 bp, Probe sequence
gatatatcggaatcagaatttatgg

SEQ ID NO: 263372 - DNA, 25 bp, Probe sequence
gtttcatttgattatatagattgga

SEQ ID NO: 263373 - DNA, 25 bp, Probe sequence
gtcaaatgtacaacgagattgcgaa

SEQ ID NO: 263374 - DNA, 25 bp, Probe sequence
gggccgtcaaaattattatatgtac

SEQ ID NO: 263375 - DNA, 25 bp, Probe sequence
ggtggagaagtgttctactattaca

SEQ ID NO: 263376 - DNA, 25 bp, Probe sequence
ggagaagtgttctactattacacag

SEQ ID NO: 263377 - DNA, 25 bp, Probe sequence
ggaaaaagtatatacaatggcttat

SEQ ID NO: 263378 - DNA, 25 bp, Probe sequence
ggacatcatgcgaatttgattttac

SEQ ID NO: 263379 - DNA, 25 bp, Probe sequence
ggaatcagaatttatggactcagcg

SEQ ID NO: 263380 - DNA, 25 bp, Probe sequence
tcagcgtatgagttgtataaacaat

SEQ ID NO: 263381 - DNA, 25 bp, Probe sequence
tacaatggcttatatagatgatgaa

SEQ ID NO: 263382 - DNA, 25 bp, Probe sequence
tagattggatcaatacagagtttga

SEQ ID NO: 263383 - DNA, 25 bp, Probe sequence
tttggggttataccagaaatggaat

SEQ ID NO: 263384 - DNA, 25 bp, Probe sequence
ttctactattacacagaacctggaa

SEQ ID NO: 263385 - DNA, 25 bp, Probe sequence
attgttggcatgatacctgtagaat

SEQ ID NO: 263386 - DNA, 25 bp, Probe sequence
attgcaaatgagattgttggcatga

SEQ ID NO: 263387 - DNA, 25 bp, Probe sequence
atatacaatagcctatgtaaatgat

SEQ ID NO: 263388 - DNA, 25 bp, Probe sequence
atgatagaggtggagaggtcgtttt

SEQ ID NO: 263389 - DNA, 25 bp, Probe sequence
atgagattgttggcatgatacctgt

SEQ ID NO: 263390 - DNA, 25 bp, Probe sequence
aggtatatacaatagcctatgtaaa

SEQ ID NO: 263391 - DNA, 25 bp, Probe sequence
agtgaaatgtacaacaagattgcaa

SEQ ID NO: 263392 - DNA, 25 bp, Probe sequence
agattgttggcatgatacctgtaga

SEQ ID NO: 263393 - DNA, 25 bp, Probe sequence
aaatgatagaggtggagaggtcgtt

SEQ ID NO: 263394 - DNA, 25 bp, Probe sequence
aaatgagattgttggcatgatacct

SEQ ID NO: 263395 - DNA, 25 bp, Probe sequence
aaaggtatatacaatagcctatgta

SEQ ID NO: 263396 - DNA, 25 bp, Probe sequence
aaactaagtgaaatgtacaacaaga

SEQ ID NO: 263397 - DNA, 25 bp, Probe sequence
aatgatagaggtggagaggtcgttt

SEQ ID NO: 263398 - DNA, 25 bp, Probe sequence
aatgagattgttggcatgatacctg

SEQ ID NO: 263399 - DNA, 25 bp, Probe sequence
caaatgagattgttggcatgatacc

SEQ ID NO: 263400 - DNA, 25 bp, Probe sequence
gcaaatgagattgttggcatgatac

SEQ ID NO: 263401 - DNA, 25 bp, Probe sequence
gaattattacatgaatatatctaga

SEQ ID NO: 263402 - DNA, 25 bp, Probe sequence
gaaatgtacaacaagattgcaaatg

SEQ ID NO: 263403 - DNA, 25 bp, Probe sequence
gagattgttggcatgatacctgtag

SEQ ID NO: 263404 - DNA, 25 bp, Probe sequence
gatagaggtggagaggtcgttttta

SEQ ID NO: 263405 - DNA, 25 bp, Probe sequence
gttggcatgatacctgtagaatggg

SEQ ID NO: 263406 - DNA, 25 bp, Probe sequence
gattgttggcatgatacctgtagaa

SEQ ID NO: 263407 - DNA, 25 bp, Probe sequence
gattgcaaatgagattgttggcatg

SEQ ID NO: 263408 - DNA, 25 bp, Probe sequence
gtatatacaatagcctatgtaaatg

SEQ ID NO: 263409 - DNA, 25 bp, Probe sequence
ggtatatacaatagcctatgtaaat

SEQ ID NO: 263410 - DNA, 25 bp, Probe sequence
tgatagaggtggagaggtcgttttt

SEQ ID NO: 263411 - DNA, 25 bp, Probe sequence
tgttggcatgatacctgtagaatgg

SEQ ID NO: 263412 - DNA, 25 bp, Probe sequence
tgagattgttggcatgatacctgta

SEQ ID NO: 263413 - DNA, 25 bp, Probe sequence
taatgtttcggaagaaatatttgat

SEQ ID NO: 263414 - DNA, 25 bp, Probe sequence
tacaatagcctatgtaaatgataga

SEQ ID NO: 263415 - DNA, 25 bp, Probe sequence
tattacatgaatatatctagagatt

SEQ ID NO: 263416 - DNA, 25 bp, Probe sequence
ttgttggcatgatacctgtagaatg

SEQ ID NO: 263417 - DNA, 25 bp, Probe sequence
ttgcaaatgagattgttggcatgat

SEQ ID NO: 263418 - DNA, 25 bp, Probe sequence
ttggcatgatacctgtagaatggga

SEQ ID NO: 263419 - DNA, 25 bp, Probe sequence
attacacggatatatctagagatta

SEQ ID NO: 263420 - DNA, 25 bp, Probe sequence
attatactaaaccaggtagcgatga

SEQ ID NO: 263421 - DNA, 25 bp, Probe sequence
ataggggagataacatgactttcga

SEQ ID NO: 263422 - DNA, 25 bp, Probe sequence
atacaattgcctacctagatgatga

SEQ ID NO: 263423 - DNA, 25 bp, Probe sequence
atctagagattataatatttcagaa

SEQ ID NO: 263424 - DNA, 25 bp, Probe sequence
aggggagataacatgactttcgaag

SEQ ID NO: 263425 - DNA, 25 bp, Probe sequence
actaaaccaggtagcgatgaattga

SEQ ID NO: 263426 - DNA, 25 bp, Probe sequence
aaccaggtagcgatgaattgaatta

SEQ ID NO: 263427 - DNA, 25 bp, Probe sequence
aatatttgatgatttatggatgaat

SEQ ID NO: 263428 - DNA, 25 bp, Probe sequence
aattgcaaatgagattagtgggatg

SEQ ID NO: 263429 - DNA, 25 bp, Probe sequence
caattgcctacctagatgatgaagg

SEQ ID NO: 263430 - DNA, 25 bp, Probe sequence
ccaggtagcgatgaattgaattatt

SEQ ID NO: 263431 - DNA, 25 bp, Probe sequence
gaattattacacggatatatctaga

SEQ ID NO: 263432 - DNA, 25 bp, Probe sequence
gaatctttattacttgtttatgaat

SEQ ID NO: 263433 - DNA, 25 bp, Probe sequence
gagattagtgggatgataccagtag

SEQ ID NO: 263434 - DNA, 25 bp, Probe sequence
gatgaaggtggagaagtcgttttta

SEQ ID NO: 263435 - DNA, 25 bp, Probe sequence
gatgaatctttattacttgtttatg

SEQ ID NO: 263436 - DNA, 25 bp, Probe sequence
gatgaattgaattattacacggata

SEQ ID NO: 263437 - DNA, 25 bp, Probe sequence
gtatatacaattgcctacctagatg

SEQ ID NO: 263438 - DNA, 25 bp, Probe sequence
gtgggatgataccagtagagtggga

SEQ ID NO: 263439 - DNA, 25 bp, Probe sequence
ggggagataacatgactttcgaaga

SEQ ID NO: 263440 - DNA, 25 bp, Probe sequence
ggatgaatctttattacttgtttat

SEQ ID NO: 263441 - DNA, 25 bp, Probe sequence
ggatgataccagtagagtgggaaaa

SEQ ID NO: 263442 - DNA, 25 bp, Probe sequence
ggagataacatgactttcgaagaaa

SEQ ID NO: 263443 - DNA, 25 bp, Probe sequence
ggaaaaggtatatacaattgcctac

SEQ ID NO: 263444 - DNA, 25 bp, Probe sequence
tggagaagtcgtttttaattatact

SEQ ID NO: 263445 - DNA, 25 bp, Probe sequence
tgaaggtggagaagtcgtttttaat

SEQ ID NO: 263446 - DNA, 25 bp, Probe sequence
tctttattacttgtttatgaattta

SEQ ID NO: 263447 - DNA, 25 bp, Probe sequence
tacaattgcctacctagatgatgaa

SEQ ID NO: 263448 - DNA, 25 bp, Probe sequence
tatggatgaatctttattacttgtt

SEQ ID NO: 263449 - DNA, 25 bp, Probe sequence
tatacaattgcctacctagatgatg

SEQ ID NO: 263450 - DNA, 25 bp, Probe sequence
tatatacaattgcctacctagatga

SEQ ID NO: 263451 - DNA, 25 bp, Probe sequence
ttaattatactaaaccaggtagcga

SEQ ID NO: 263452 - DNA, 25 bp, Probe sequence
ttgcctacctagatgatgaaggtgg

SEQ ID NO: 263453 - DNA, 25 bp, Probe sequence
attgaattattacacatatatccct

SEQ ID NO: 263454 - DNA, 25 bp, Probe sequence
attaggttttggtccatcaggaaag

SEQ ID NO: 263455 - DNA, 25 bp, Probe sequence
attattacacatatatccctagaga

SEQ ID NO: 263456 - DNA, 25 bp, Probe sequence
ataatgtctctgaaaaagtatttta

SEQ ID NO: 263457 - DNA, 25 bp, Probe sequence
aggaaaggaaaactactatatgtat

SEQ ID NO: 263458 - DNA, 25 bp, Probe sequence
agtattttatgatttgtggacggat

SEQ ID NO: 263459 - DNA, 25 bp, Probe sequence
acaattgcttatgtagatgatgaag

SEQ ID NO: 263460 - DNA, 25 bp, Probe sequence
aaagaagatttagaaccatggacat

SEQ ID NO: 263461 - DNA, 25 bp, Probe sequence
aaccaggtagtgatgaattgaatta

SEQ ID NO: 263462 - DNA, 25 bp, Probe sequence
aattatactaaaccaggtagtgatg

SEQ ID NO: 263463 - DNA, 25 bp, Probe sequence
gaattattacacatatatccctaga

SEQ ID NO: 263464 - DNA, 25 bp, Probe sequence
gaatttgattttacaagagagggta

SEQ ID NO: 263465 - DNA, 25 bp, Probe sequence
gaagatttagaaccatggacatcat

SEQ ID NO: 263466 - DNA, 25 bp, Probe sequence
gaaccatggacatcatgtgaatttg

SEQ ID NO: 263467 - DNA, 25 bp, Probe sequence
gaaaaagtatatacaattgcttatg

SEQ ID NO: 263468 - DNA, 25 bp, Probe sequence
gagagggtaatttgaaagtatcgtt

SEQ ID NO: 263469 - DNA, 25 bp, Probe sequence
gagtataatgtctctgaaaaagtat

SEQ ID NO: 263470 - DNA, 25 bp, Probe sequence
gatgaaggtggagaagtcgttttta

SEQ ID NO: 263471 - DNA, 25 bp, Probe sequence
gatttgtggacggatttatatagat

SEQ ID NO: 263472 - DNA, 25 bp, Probe sequence
gattaaattaggttttggtccatca

SEQ ID NO: 263473 - DNA, 25 bp, Probe sequence
gtatcgtttgattatatagattgga

SEQ ID NO: 263474 - DNA, 25 bp, Probe sequence
gtgggatgataccagtagagtggga

SEQ ID NO: 263475 - DNA, 25 bp, Probe sequence
ggtccatcaggaaaggaaaactact

SEQ ID NO: 263476 - DNA, 25 bp, Probe sequence
ggtaatttgaaagtatcgtttgatt

SEQ ID NO: 263477 - DNA, 25 bp, Probe sequence
ggatgataccagtagagtgggaaaa

SEQ ID NO: 263478 - DNA, 25 bp, Probe sequence
ggacatcatgtgaatttgattttac

SEQ ID NO: 263479 - DNA, 25 bp, Probe sequence
tggacggatttatatagattgttta

SEQ ID NO: 263480 - DNA, 25 bp, Probe sequence
tggagaagtcgtttttaattatact

SEQ ID NO: 263481 - DNA, 25 bp, Probe sequence
tgaaggtggagaagtcgtttttaat

SEQ ID NO: 263482 - DNA, 25 bp, Probe sequence
ttaaattaggttttggtccatcagg

SEQ ID NO: 263483 - DNA, 25 bp, Probe sequence
taggttttggtccatcaggaaagga

SEQ ID NO: 263484 - DNA, 25 bp, Probe sequence
tatatccctagagagtataatgtct

SEQ ID NO: 263485 - DNA, 25 bp, Probe sequence
tattacacatatatccctagagagt

SEQ ID NO: 263486 - DNA, 25 bp, Probe sequence
ttacacatatatccctagagagtat

SEQ ID NO: 263487 - DNA, 25 bp, Probe sequence
atatcaacggggatgttcctatatt

SEQ ID NO: 263488 - DNA, 25 bp, Probe sequence
atcaacggggatgttcctatattca

SEQ ID NO: 263489 - DNA, 25 bp, Probe sequence
ataagcatgatatcaacggggatgt

SEQ ID NO: 263490 - DNA, 25 bp, Probe sequence
atgatatcaacggggatgttcctat

SEQ ID NO: 263491 - DNA, 25 bp, Probe sequence
atgttcctatattcattaacattgg

SEQ ID NO: 263492 - DNA, 25 bp, Probe sequence
agataagcatgatatcaacggggat

SEQ ID NO: 263493 - DNA, 25 bp, Probe sequence
agcatgatatcaacggggatgttcc

SEQ ID NO: 263494 - DNA, 25 bp, Probe sequence
acggggatgttcctatattcattaa

SEQ ID NO: 263495 - DNA, 25 bp, Probe sequence
aacggggatgttcctatattcatta

SEQ ID NO: 263496 - DNA, 25 bp, Probe sequence
aagcatgatatcaacggggatgttc

SEQ ID NO: 263497 - DNA, 25 bp, Probe sequence
caacggggatgttcctatattcatt

SEQ ID NO: 263498 - DNA, 25 bp, Probe sequence
catgatatcaacggggatgttccta

SEQ ID NO: 263499 - DNA, 25 bp, Probe sequence
cggggatgttcctatattcattaac

SEQ ID NO: 263500 - DNA, 25 bp, Probe sequence
gcatgatatcaacggggatgttcct

SEQ ID NO: 263501 - DNA, 25 bp, Probe sequence
gaggaattagataaaactgtaaaag

SEQ ID NO: 263502 - DNA, 25 bp, Probe sequence
gatgttcctatattcattaacattg

SEQ ID NO: 263503 - DNA, 25 bp, Probe sequence
gataagcatgatatcaacggggatg

SEQ ID NO: 263504 - DNA, 25 bp, Probe sequence
gatatcaacggggatgttcctatat

SEQ ID NO: 263505 - DNA, 25 bp, Probe sequence
gttcctatattcattaacattggtg

SEQ ID NO: 263506 - DNA, 25 bp, Probe sequence
gggatgttcctatattcattaacat

SEQ ID NO: 263507 - DNA, 25 bp, Probe sequence
ggggatgttcctatattcattaaca

SEQ ID NO: 263508 - DNA, 25 bp, Probe sequence
ggatgttcctatattcattaacatt

SEQ ID NO: 263509 - DNA, 25 bp, Probe sequence
tgttcctatattcattaacattggt

SEQ ID NO: 263510 - DNA, 25 bp, Probe sequence
tgatatcaacggggatgttcctata

SEQ ID NO: 263511 - DNA, 25 bp, Probe sequence
tgaggaattagataaaactgtaaaa

SEQ ID NO: 263512 - DNA, 25 bp, Probe sequence
tcaacggggatgttcctatattcat

SEQ ID NO: 263513 - DNA, 25 bp, Probe sequence
taagcatgatatcaacggggatgtt

SEQ ID NO: 263514 - DNA, 25 bp, Probe sequence
tatcaacggggatgttcctatattc

SEQ ID NO: 263515 - DNA, 25 bp, Probe sequence
aggttgtgatagttcaagcgatact

SEQ ID NO: 263516 - DNA, 25 bp, Probe sequence
agcttgcactgttcataagtgttat

SEQ ID NO: 263517 - DNA, 25 bp, Probe sequence
actaatgaaaatgtaccgagatatg

SEQ ID NO: 263518 - DNA, 25 bp, Probe sequence
aaattttgggccgtctgatgaagat

SEQ ID NO: 263519 - DNA, 25 bp, Probe sequence
aaagagctttgcgaaaacgttagat

SEQ ID NO: 263520 - DNA, 25 bp, Probe sequence
aaaggctccaatattaaagttacat

SEQ ID NO: 263521 - DNA, 25 bp, Probe sequence
aaaaaagcttgcactgttcataagt

SEQ ID NO: 263522 - DNA, 25 bp, Probe sequence
aaccgggtgaaatagatgacgaagg

SEQ ID NO: 263523 - DNA, 25 bp, Probe sequence
aagatcaagagacaacattaagaga

SEQ ID NO: 263524 - DNA, 25 bp, Probe sequence
aatgtaccgagatatgaagcagaat

SEQ ID NO: 263525 - DNA, 25 bp, Probe sequence
aattttttagtcagtatgccgattt

SEQ ID NO: 263526 - DNA, 25 bp, Probe sequence
gcgataaggggacttggactttact

SEQ ID NO: 263527 - DNA, 25 bp, Probe sequence
gaatctcgaggatttatacgacaaa

SEQ ID NO: 263528 - DNA, 25 bp, Probe sequence
gaaggatatagagatggtgaattta

SEQ ID NO: 263529 - DNA, 25 bp, Probe sequence
gacgaaggcatggttttatatctaa

SEQ ID NO: 263530 - DNA, 25 bp, Probe sequence
gagatatttatccaattacaacgaa

SEQ ID NO: 263531 - DNA, 25 bp, Probe sequence
gatggtgaatttaaaaagggcgata

SEQ ID NO: 263532 - DNA, 25 bp, Probe sequence
gattatttaaattttgggccgtctg

SEQ ID NO: 263533 - DNA, 25 bp, Probe sequence
gttcaagcgatactgcggaaaaagc

SEQ ID NO: 263534 - DNA, 25 bp, Probe sequence
gtcagtatgccgattttaaagattt

SEQ ID NO: 263535 - DNA, 25 bp, Probe sequence
gtgatagttcaagcgatactgcgga

SEQ ID NO: 263536 - DNA, 25 bp, Probe sequence
gggacttggactttactcacaagtt

SEQ ID NO: 263537 - DNA, 25 bp, Probe sequence
gggatatctaaaaaagcttgcactg

SEQ ID NO: 263538 - DNA, 25 bp, Probe sequence
ggcaacaggttattattttgtaaat

SEQ ID NO: 263539 - DNA, 25 bp, Probe sequence
tggactttactcacaagtttttcaa

SEQ ID NO: 263540 - DNA, 25 bp, Probe sequence
tgggccgtctgatgaagatagctaa

SEQ ID NO: 263541 - DNA, 25 bp, Probe sequence
tgggcatttttataataggttgtga

SEQ ID NO: 263542 - DNA, 25 bp, Probe sequence
tccaattacaacgaaaaaggctcca

SEQ ID NO: 263543 - DNA, 25 bp, Probe sequence
tgagaaaaaataccgtgttgaactt

SEQ ID NO: 263544 - DNA, 25 bp, Probe sequence
tgcgaaaacgttagatatgtatcca

SEQ ID NO: 263545 - DNA, 25 bp, Probe sequence
taaggggacttggactttactcaca

SEQ ID NO: 263546 - DNA, 25 bp, Probe sequence
taagtgttattattttgggcatttt

SEQ ID NO: 263547 - DNA, 25 bp, Probe sequence
taaaaggaagttcagttggatacaa

SEQ ID NO: 263548 - DNA, 25 bp, Probe sequence
tatgtatccaattaagaatctcgag

SEQ ID NO: 263549 - DNA, 25 bp, Probe sequence
atattcctagttatgaagcagaata

SEQ ID NO: 263550 - DNA, 25 bp, Probe sequence
atagttgttgtagcaggttgtggca

SEQ ID NO: 263551 - DNA, 25 bp, Probe sequence
atcttgcttttaatagttgttgtag

SEQ ID NO: 263552 - DNA, 25 bp, Probe sequence
agtatcttgcttttaatagttgttg

SEQ ID NO: 263553 - DNA, 25 bp, Probe sequence
agagagacgtgaaatgatgggaaat

SEQ ID NO: 263554 - DNA, 25 bp, Probe sequence
agagacgtgaaatgatgggaaatat

SEQ ID NO: 263555 - DNA, 25 bp, Probe sequence
agacgtgaaatgatgggaaatataa

SEQ ID NO: 263556 - DNA, 25 bp, Probe sequence
acaactaatgaaaatattcctagtt

SEQ ID NO: 263557 - DNA, 25 bp, Probe sequence
aaatattcctagttatgaagcagaa

SEQ ID NO: 263558 - DNA, 25 bp, Probe sequence
aaaatattcctagttatgaagcaga

SEQ ID NO: 263559 - DNA, 25 bp, Probe sequence
aactaatgaaaatattcctagttat

SEQ ID NO: 263560 - DNA, 25 bp, Probe sequence
aagtatcttgcttttaatagttgtt

SEQ ID NO: 263561 - DNA, 25 bp, Probe sequence
aatagttgttgtagcaggttgtggc

SEQ ID NO: 263562 - DNA, 25 bp, Probe sequence
aatattcctagttatgaagcagaat

SEQ ID NO: 263563 - DNA, 25 bp, Probe sequence
caactaatgaaaatattcctagtta

SEQ ID NO: 263564 - DNA, 25 bp, Probe sequence
cttttaatagttgttgtagcaggtt

SEQ ID NO: 263565 - DNA, 25 bp, Probe sequence
cttgcttttaatagttgttgtagca

SEQ ID NO: 263566 - DNA, 25 bp, Probe sequence
gcttttaatagttgttgtagcaggt

SEQ ID NO: 263567 - DNA, 25 bp, Probe sequence
gaaaatattcctagttatgaagcag

SEQ ID NO: 263568 - DNA, 25 bp, Probe sequence
gacgtgaaatgatgggaaatataaa

SEQ ID NO: 263569 - DNA, 25 bp, Probe sequence
gagataaggggacgtggactttact

SEQ ID NO: 263570 - DNA, 25 bp, Probe sequence
gagacgtgaaatgatgggaaatata

SEQ ID NO: 263571 - DNA, 25 bp, Probe sequence
gagagacgtgaaatgatgggaaata

SEQ ID NO: 263572 - DNA, 25 bp, Probe sequence
gtatcttgcttttaatagttgttgt

SEQ ID NO: 263573 - DNA, 25 bp, Probe sequence
ttttaatagttgttgtagcaggttg

SEQ ID NO: 263574 - DNA, 25 bp, Probe sequence
tgaaaatattcctagttatgaagca

SEQ ID NO: 263575 - DNA, 25 bp, Probe sequence
tgcttttaatagttgttgtagcagg

SEQ ID NO: 263576 - DNA, 25 bp, Probe sequence
tcttgcttttaatagttgttgtagc

SEQ ID NO: 263577 - DNA, 25 bp, Probe sequence
taagtatcttgcttttaatagttgt

SEQ ID NO: 263578 - DNA, 25 bp, Probe sequence
tatcttgcttttaatagttgttgta

SEQ ID NO: 263579 - DNA, 25 bp, Probe sequence
tataaaaagttttgcattgtacata

SEQ ID NO: 263580 - DNA, 25 bp, Probe sequence
tattcctagttatgaagcagaatac

SEQ ID NO: 263581 - DNA, 25 bp, Probe sequence
ttgcttttaatagttgttgtagcag

SEQ ID NO: 263582 - DNA, 25 bp, Probe sequence
atttcgactgaaaaatcacctatat

SEQ ID NO: 263583 - DNA, 25 bp, Probe sequence
atatacacagatttcgctaaaagta

SEQ ID NO: 263584 - DNA, 25 bp, Probe sequence
atcagtcattgaatttttaagttat

SEQ ID NO: 263585 - DNA, 25 bp, Probe sequence
agaaccgctaaaggccattattttg

SEQ ID NO: 263586 - DNA, 25 bp, Probe sequence
aggccattattttgttactacattt

SEQ ID NO: 263587 - DNA, 25 bp, Probe sequence
aacagcaaattatcagtcattgaat

SEQ ID NO: 263588 - DNA, 25 bp, Probe sequence
aaggccattattttgttactacatt

SEQ ID NO: 263589 - DNA, 25 bp, Probe sequence
aatgttcctagttatgatgttgaat

SEQ ID NO: 263590 - DNA, 25 bp, Probe sequence
aataaaccgggtgaattggatgatg

SEQ ID NO: 263591 - DNA, 25 bp, Probe sequence
aatactagaaccgctaaaggccatt

SEQ ID NO: 263592 - DNA, 25 bp, Probe sequence
aatataataatggtgatgtttcaat

SEQ ID NO: 263593 - DNA, 25 bp, Probe sequence
caaaacgtgaaaacagcaaattatc

SEQ ID NO: 263594 - DNA, 25 bp, Probe sequence
ctagaaccgctaaaggccattattt

SEQ ID NO: 263595 - DNA, 25 bp, Probe sequence
cgctaaaggccattattttgttact

SEQ ID NO: 263596 - DNA, 25 bp, Probe sequence
gccattattttgttactacatttta

SEQ ID NO: 263597 - DNA, 25 bp, Probe sequence
gctaaaggccattattttgttacta

SEQ ID NO: 263598 - DNA, 25 bp, Probe sequence
gaaccgctaaaggccattattttgt

SEQ ID NO: 263599 - DNA, 25 bp, Probe sequence
gaaaatgttcctagttatgatgttg

SEQ ID NO: 263600 - DNA, 25 bp, Probe sequence
gaaaacagcaaattatcagtcattg

SEQ ID NO: 263601 - DNA, 25 bp, Probe sequence
gatgataagctcaagcagaaaatag

SEQ ID NO: 263602 - DNA, 25 bp, Probe sequence
gatatacacagatttcgctaaaagt

SEQ ID NO: 263603 - DNA, 25 bp, Probe sequence
gtaaaagatgataagctcaagcaga

SEQ ID NO: 263604 - DNA, 25 bp, Probe sequence
gtcgttataatatttcgactgaaaa

SEQ ID NO: 263605 - DNA, 25 bp, Probe sequence
ggataggaatactagaaccgctaaa

SEQ ID NO: 263606 - DNA, 25 bp, Probe sequence
ggacgatatacacagatttcgctaa

SEQ ID NO: 263607 - DNA, 25 bp, Probe sequence
ggaatactagaaccgctaaaggcca

SEQ ID NO: 263608 - DNA, 25 bp, Probe sequence
tgttactacattttaccggaatggt

SEQ ID NO: 263609 - DNA, 25 bp, Probe sequence
tcgactgaaaaatcacctatattaa

SEQ ID NO: 263610 - DNA, 25 bp, Probe sequence
tctggataggaatactagaaccgct

SEQ ID NO: 263611 - DNA, 25 bp, Probe sequence
taatggtgatgtttcaattaatgaa

SEQ ID NO: 263612 - DNA, 25 bp, Probe sequence
taaaccgggtgaattggatgatgaa

SEQ ID NO: 263613 - DNA, 25 bp, Probe sequence
taaaggccattattttgttactaca

SEQ ID NO: 263614 - DNA, 25 bp, Probe sequence
tactagaaccgctaaaggccattat

SEQ ID NO: 263615 - DNA, 25 bp, Probe sequence
tttgttactacattttaccggaatg

SEQ ID NO: 263616 - DNA, 25 bp, Probe sequence
atgacgaaggtatggttttattcct

SEQ ID NO: 263617 - DNA, 25 bp, Probe sequence
attttgagcatttttataataagtt

SEQ ID NO: 263618 - DNA, 25 bp, Probe sequence
ataagttgtaatagttcaagcgata

SEQ ID NO: 263619 - DNA, 25 bp, Probe sequence
ataagtgctattattttgagcattt

SEQ ID NO: 263620 - DNA, 25 bp, Probe sequence
aggcgagatagatgacgaaggtatg

SEQ ID NO: 263621 - DNA, 25 bp, Probe sequence
agtgctattattttgagcattttta

SEQ ID NO: 263622 - DNA, 25 bp, Probe sequence
accaggcgagatagatgacgaaggt

SEQ ID NO: 263623 - DNA, 25 bp, Probe sequence
acaaaccaggcgagatagatgacga

SEQ ID NO: 263624 - DNA, 25 bp, Probe sequence
aaaccaggcgagatagatgacgaag

SEQ ID NO: 263625 - DNA, 25 bp, Probe sequence
aacaaaccaggcgagatagatgacg

SEQ ID NO: 263626 - DNA, 25 bp, Probe sequence
aaccaggcgagatagatgacgaagg

SEQ ID NO: 263627 - DNA, 25 bp, Probe sequence
aagaaggttatcgagatgacgaatt

SEQ ID NO: 263628 - DNA, 25 bp, Probe sequence
aaggttatcgagatgacgaatttaa

SEQ ID NO: 263629 - DNA, 25 bp, Probe sequence
aagtgctattattttgagcattttt

SEQ ID NO: 263630 - DNA, 25 bp, Probe sequence
aataagttgtaatagttcaagcgat

SEQ ID NO: 263631 - DNA, 25 bp, Probe sequence
caaaccaggcgagatagatgacgaa

SEQ ID NO: 263632 - DNA, 25 bp, Probe sequence
caggcgagatagatgacgaaggtat

SEQ ID NO: 263633 - DNA, 25 bp, Probe sequence
cgagatgacgaatttaaaaaaggcg

SEQ ID NO: 263634 - DNA, 25 bp, Probe sequence
ccaggcgagatagatgacgaaggta

SEQ ID NO: 263635 - DNA, 25 bp, Probe sequence
gcgagatagatgacgaaggtatggt

SEQ ID NO: 263636 - DNA, 25 bp, Probe sequence
gaaggttatcgagatgacgaattta

SEQ ID NO: 263637 - DNA, 25 bp, Probe sequence
gacaaagaaggttatcgagatgacg

SEQ ID NO: 263638 - DNA, 25 bp, Probe sequence
gatgacgaaggtatggttttattcc

SEQ ID NO: 263639 - DNA, 25 bp, Probe sequence
gagatagatgacgaaggtatggttt

SEQ ID NO: 263640 - DNA, 25 bp, Probe sequence
gttcataagtgctattattttgagc

SEQ ID NO: 263641 - DNA, 25 bp, Probe sequence
gtgctattattttgagcatttttat

SEQ ID NO: 263642 - DNA, 25 bp, Probe sequence
ggttatcgagatgacgaatttaaaa

SEQ ID NO: 263643 - DNA, 25 bp, Probe sequence
ggcgagatagatgacgaaggtatgg

SEQ ID NO: 263644 - DNA, 25 bp, Probe sequence
tgacgaaggtatggttttattcctt

SEQ ID NO: 263645 - DNA, 25 bp, Probe sequence
taaaaaaggcgataagggtacatgg

SEQ ID NO: 263646 - DNA, 25 bp, Probe sequence
taagtgctattattttgagcatttt

SEQ ID NO: 263647 - DNA, 25 bp, Probe sequence
tatggttttattccttaatagaaat

SEQ ID NO: 263648 - DNA, 25 bp, Probe sequence
tttattccttaatagaaatacaaag

SEQ ID NO: 263649 - DNA, 25 bp, Probe sequence
ttgagcatttttataataagttgta

SEQ ID NO: 263650 - DNA, 25 bp, Probe sequence
attacaaccaaaaagtcgccagtat

SEQ ID NO: 263651 - DNA, 25 bp, Probe sequence
ataatgtgccaagctacgatgcaga

SEQ ID NO: 263652 - DNA, 25 bp, Probe sequence
atcaagtacagataatgtgccaagc

SEQ ID NO: 263653 - DNA, 25 bp, Probe sequence
atgctgattttagagatcttaaata

SEQ ID NO: 263654 - DNA, 25 bp, Probe sequence
atgtgccaagctacgatgcagaata

SEQ ID NO: 263655 - DNA, 25 bp, Probe sequence
agtacagataatgtgccaagctacg

SEQ ID NO: 263656 - DNA, 25 bp, Probe sequence
agtatgctgattttagagatcttaa

SEQ ID NO: 263657 - DNA, 25 bp, Probe sequence
agataatgtgccaagctacgatgca

SEQ ID NO: 263658 - DNA, 25 bp, Probe sequence
agatccaaatctcaaaaataaaata

SEQ ID NO: 263659 - DNA, 25 bp, Probe sequence
agagaagtttatcctattacaacca

SEQ ID NO: 263660 - DNA, 25 bp, Probe sequence
cctattacaaccaaaaagtcgccag

SEQ ID NO: 263661 - DNA, 25 bp, Probe sequence
acttagagaagtttatcctattaca

SEQ ID NO: 263662 - DNA, 25 bp, Probe sequence
acagataatgtgccaagctacgatg

SEQ ID NO: 263663 - DNA, 25 bp, Probe sequence
aaaagaccaagaaacagctgtaaga

SEQ ID NO: 263664 - DNA, 25 bp, Probe sequence
aagtacagataatgtgccaagctac

SEQ ID NO: 263665 - DNA, 25 bp, Probe sequence
aatgtgccaagctacgatgcagaat

SEQ ID NO: 263666 - DNA, 25 bp, Probe sequence
caagctacgatgcagaatataaaat

SEQ ID NO: 263667 - DNA, 25 bp, Probe sequence
cagataatgtgccaagctacgatgc

SEQ ID NO: 263668 - DNA, 25 bp, Probe sequence
ctattacaaccaaaaagtcgccagt

SEQ ID NO: 263669 - DNA, 25 bp, Probe sequence
gccaagctacgatgcagaatataaa

SEQ ID NO: 263670 - DNA, 25 bp, Probe sequence
gaccaagaaacagctgtaagagatt

SEQ ID NO: 263671 - DNA, 25 bp, Probe sequence
gagaagtttatcctattacaaccaa

SEQ ID NO: 263672 - DNA, 25 bp, Probe sequence
gataatgtgccaagctacgatgcag

SEQ ID NO: 263673 - DNA, 25 bp, Probe sequence
gtatgctgattttagagatcttaaa

SEQ ID NO: 263674 - DNA, 25 bp, Probe sequence
gtacagataatgtgccaagctacga

SEQ ID NO: 263675 - DNA, 25 bp, Probe sequence
gtgccaagctacgatgcagaatata

SEQ ID NO: 263676 - DNA, 25 bp, Probe sequence
tgtgccaagctacgatgcagaatat

SEQ ID NO: 263677 - DNA, 25 bp, Probe sequence
tcctattacaaccaaaaagtcgcca

SEQ ID NO: 263678 - DNA, 25 bp, Probe sequence
taatgtgccaagctacgatgcagaa

SEQ ID NO: 263679 - DNA, 25 bp, Probe sequence
tacaaccaaaaagtcgccagtatta

SEQ ID NO: 263680 - DNA, 25 bp, Probe sequence
tacagataatgtgccaagctacgat

SEQ ID NO: 263681 - DNA, 25 bp, Probe sequence
tagagaagtttatcctattacaacc

SEQ ID NO: 263682 - DNA, 25 bp, Probe sequence
tatcctattacaaccaaaaagtcgc

SEQ ID NO: 263683 - DNA, 25 bp, Probe sequence
ttacaaccaaaaagtcgccagtatt

SEQ ID NO: 263684 - DNA, 25 bp, Probe sequence
acagctaaggggtactactttgtca

SEQ ID NO: 263685 - DNA, 25 bp, Probe sequence
ctttggattaccagccagcgaaggt

SEQ ID NO: 263686 - DNA, 25 bp, Probe sequence
attaccagccagcgaaggtggatga

SEQ ID NO: 263687 - DNA, 25 bp, Probe sequence
atgaaggcatggtcttgtacttaga

SEQ ID NO: 263688 - DNA, 25 bp, Probe sequence
accagccagcgaaggtggatgaaga

SEQ ID NO: 263689 - DNA, 25 bp, Probe sequence
agcgaaggtggatgaagatgaaaga

SEQ ID NO: 263690 - DNA, 25 bp, Probe sequence
gaagttccgttggagataggaagtt

SEQ ID NO: 263691 - DNA, 25 bp, Probe sequence
acacgcacagctaaggggtactact

SEQ ID NO: 263692 - DNA, 25 bp, Probe sequence
aaaatagccatttatcagtaataga

SEQ ID NO: 263693 - DNA, 25 bp, Probe sequence
aacacacgcacagctaaggggtact

SEQ ID NO: 263694 - DNA, 25 bp, Probe sequence
aaggcatggtcttgtacttagatag

SEQ ID NO: 263695 - DNA, 25 bp, Probe sequence
cacacgcacagctaaggggtactac

SEQ ID NO: 263696 - DNA, 25 bp, Probe sequence
ctactttgtcaggacgttttatcgc

SEQ ID NO: 263697 - DNA, 25 bp, Probe sequence
cttagatagaaacacacgcacagct

SEQ ID NO: 263698 - DNA, 25 bp, Probe sequence
ctttgtcaggacgttttatcgcaag

SEQ ID NO: 263699 - DNA, 25 bp, Probe sequence
gtactactttgtcaggacgttttat

SEQ ID NO: 263700 - DNA, 25 bp, Probe sequence
cgcacagctaaggggtactactttg

SEQ ID NO: 263701 - DNA, 25 bp, Probe sequence
ccgggtgaactaagtaatgaaggca

SEQ ID NO: 263702 - DNA, 25 bp, Probe sequence
gctaaggggtactactttgtcagga

SEQ ID NO: 263703 - DNA, 25 bp, Probe sequence
gaaacacacgcacagctaaggggta

SEQ ID NO: 263704 - DNA, 25 bp, Probe sequence
gaaacgtgaaaatagccatttatca

SEQ ID NO: 263705 - DNA, 25 bp, Probe sequence
gaaaggaagttccgttggagatagg

SEQ ID NO: 263706 - DNA, 25 bp, Probe sequence
gataggaagttagaaattgattttt

SEQ ID NO: 263707 - DNA, 25 bp, Probe sequence
gatagaaacacacgcacagctaagg

SEQ ID NO: 263708 - DNA, 25 bp, Probe sequence
gattctttggattaccagccagcga

SEQ ID NO: 263709 - DNA, 25 bp, Probe sequence
gtacttagatagaaacacacgcaca

SEQ ID NO: 263710 - DNA, 25 bp, Probe sequence
gtaatgaaggcatggtcttgtactt

SEQ ID NO: 263711 - DNA, 25 bp, Probe sequence
gtcaggacgttttatcgcaaggata

SEQ ID NO: 263712 - DNA, 25 bp, Probe sequence
ggattaccagccagcgaaggtggat

SEQ ID NO: 263713 - DNA, 25 bp, Probe sequence
taaggggtactactttgtcaggacg

SEQ ID NO: 263714 - DNA, 25 bp, Probe sequence
tagaaattgatttttcgaaacgtga

SEQ ID NO: 263715 - DNA, 25 bp, Probe sequence
tagccatttatcagtaatagattct

SEQ ID NO: 263716 - DNA, 25 bp, Probe sequence
tagattctttggattaccagccagc

SEQ ID NO: 263717 - DNA, 25 bp, Probe sequence
ttctttggattaccagccagcgaag

SEQ ID NO: 263718 - DNA, 25 bp, Probe sequence
atttcttataatcctaatgcgccta

SEQ ID NO: 263719 - DNA, 25 bp, Probe sequence
atatttcttataatcctaatgcgcc

SEQ ID NO: 263720 - DNA, 25 bp, Probe sequence
ataatcctaatgcgcctaactattc

SEQ ID NO: 263721 - DNA, 25 bp, Probe sequence
atgcgcctaactattcagctgaata

SEQ ID NO: 263722 - DNA, 25 bp, Probe sequence
atcctaatgcgcctaactattcagc

SEQ ID NO: 263723 - DNA, 25 bp, Probe sequence
acggataggataacaaatatttctt

SEQ ID NO: 263724 - DNA, 25 bp, Probe sequence
aaataattccaactgaagatgtaaa

SEQ ID NO: 263725 - DNA, 25 bp, Probe sequence
aaatcgattcaatattaagtctaat

SEQ ID NO: 263726 - DNA, 25 bp, Probe sequence
aaacttcaaattattttctcaatat

SEQ ID NO: 263727 - DNA, 25 bp, Probe sequence
aaccgagtgaaggagactataatga

SEQ ID NO: 263728 - DNA, 25 bp, Probe sequence
aatgcgcctaactattcagctgaat

SEQ ID NO: 263729 - DNA, 25 bp, Probe sequence
aatcctaatgcgcctaactattcag

SEQ ID NO: 263730 - DNA, 25 bp, Probe sequence
aattattttctcaatatggtgaatt

SEQ ID NO: 263731 - DNA, 25 bp, Probe sequence
cttataatcctaatgcgcctaacta

SEQ ID NO: 263732 - DNA, 25 bp, Probe sequence
ctaatgcgcctaactattcagctga

SEQ ID NO: 263733 - DNA, 25 bp, Probe sequence
cctaatgcgcctaactattcagctg

SEQ ID NO: 263734 - DNA, 25 bp, Probe sequence
gcgcctaactattcagctgaatata

SEQ ID NO: 263735 - DNA, 25 bp, Probe sequence
gacaaagggatgtgggttctgtatt

SEQ ID NO: 263736 - DNA, 25 bp, Probe sequence
gagcaggtaatataaaagggtcttc

SEQ ID NO: 263737 - DNA, 25 bp, Probe sequence
gagagatgtgaaatgatggagtata

SEQ ID NO: 263738 - DNA, 25 bp, Probe sequence
gagtttaaaccgagtgaaggagact

SEQ ID NO: 263739 - DNA, 25 bp, Probe sequence
gatagtatagagtttaaaccgagtg

SEQ ID NO: 263740 - DNA, 25 bp, Probe sequence
gttattgttcaaaggagcaggtaat

SEQ ID NO: 263741 - DNA, 25 bp, Probe sequence
gtattcatctattgtatcagaattc

SEQ ID NO: 263742 - DNA, 25 bp, Probe sequence
gtatcagaattcaaaggcgagagtt

SEQ ID NO: 263743 - DNA, 25 bp, Probe sequence
ggtcttctgttggatataaggagat

SEQ ID NO: 263744 - DNA, 25 bp, Probe sequence
ggttctgtattcatctattgtatca

SEQ ID NO: 263745 - DNA, 25 bp, Probe sequence
ggagatacagataattttcaatagg

SEQ ID NO: 263746 - DNA, 25 bp, Probe sequence
tgggttctgtattcatctattgtat

SEQ ID NO: 263747 - DNA, 25 bp, Probe sequence
tgtttcttgtattgatagtatagag

SEQ ID NO: 263748 - DNA, 25 bp, Probe sequence
taatgcgcctaactattcagctgaa

SEQ ID NO: 263749 - DNA, 25 bp, Probe sequence
taaaagggtcttctgttggatataa

SEQ ID NO: 263750 - DNA, 25 bp, Probe sequence
ttaagagtttaaatacggataggat

SEQ ID NO: 263751 - DNA, 25 bp, Probe sequence
ttcttataatcctaatgcgcctaac

SEQ ID NO: 263752 - DNA, 25 bp, Probe sequence
gaagacgaaattgaaggcttaaggg

SEQ ID NO: 263753 - DNA, 25 bp, Probe sequence
atgagtatgggcacttacggctcta

SEQ ID NO: 263754 - DNA, 25 bp, Probe sequence
atgctggtaaccttattatcatgag

SEQ ID NO: 263755 - DNA, 25 bp, Probe sequence
acggctctaataaatcagaaccgct

SEQ ID NO: 263756 - DNA, 25 bp, Probe sequence
acttgtcctcgtttatagaacttat

SEQ ID NO: 263757 - DNA, 25 bp, Probe sequence
aaatcaattgtttgtcgacccactg

SEQ ID NO: 263758 - DNA, 25 bp, Probe sequence
aatcaattgtttgtcgacccactgt

SEQ ID NO: 263759 - DNA, 25 bp, Probe sequence
aatttatacacatgctggtaacctt

SEQ ID NO: 263760 - DNA, 25 bp, Probe sequence
cacatgctggtaaccttattatcat

SEQ ID NO: 263761 - DNA, 25 bp, Probe sequence
cgacccactgttgcaagctattgta

SEQ ID NO: 263762 - DNA, 25 bp, Probe sequence
cccactgttgcaagctattgtatta

SEQ ID NO: 263763 - DNA, 25 bp, Probe sequence
gctggtaaccttattatcatgagta

SEQ ID NO: 263764 - DNA, 25 bp, Probe sequence
gaaccgctgattacaggtggaaatc

SEQ ID NO: 263765 - DNA, 25 bp, Probe sequence
gacccactgttgcaagctattgtat

SEQ ID NO: 263766 - DNA, 25 bp, Probe sequence
gagtatgggcacttacggctctaat

SEQ ID NO: 263767 - DNA, 25 bp, Probe sequence
tcatgagtatgggcacttacggctc

SEQ ID NO: 263768 - DNA, 25 bp, Probe sequence
gtaaccttattatcatgagtatggg

SEQ ID NO: 263769 - DNA, 25 bp, Probe sequence
gtcataggtatttcaatttatacac

SEQ ID NO: 263770 - DNA, 25 bp, Probe sequence
ggtggaaatcaattgtttgtcgacc

SEQ ID NO: 263771 - DNA, 25 bp, Probe sequence
ggatttttagtatttatagggacat

SEQ ID NO: 263772 - DNA, 25 bp, Probe sequence
ggaaatcaattgtttgtcgacccac

SEQ ID NO: 263773 - DNA, 25 bp, Probe sequence
ggcacttacggctctaataaatcag

SEQ ID NO: 263774 - DNA, 25 bp, Probe sequence
ggctctaataaatcagaaccgctga

SEQ ID NO: 263775 - DNA, 25 bp, Probe sequence
tgggcacttacggctctaataaatc

SEQ ID NO: 263776 - DNA, 25 bp, Probe sequence
tgttgcaagctattgtattaactgc

SEQ ID NO: 263777 - DNA, 25 bp, Probe sequence
tcgacccactgttgcaagctattgt

SEQ ID NO: 263778 - DNA, 25 bp, Probe sequence
tcagaaccgctgattacaggtggaa

SEQ ID NO: 263779 - DNA, 25 bp, Probe sequence
taattcgtattgtcataggtatttc

SEQ ID NO: 263780 - DNA, 25 bp, Probe sequence
tacacatgctggtaaccttattatc

SEQ ID NO: 263781 - DNA, 25 bp, Probe sequence
tacttgtcctcgtttatagaactta

SEQ ID NO: 263782 - DNA, 25 bp, Probe sequence
tagggacatatatgatattatctat

SEQ ID NO: 263783 - DNA, 25 bp, Probe sequence
tatgggcacttacggctctaataaa

SEQ ID NO: 263784 - DNA, 25 bp, Probe sequence
tatttcaatttatacacatgctggt

SEQ ID NO: 263785 - DNA, 25 bp, Probe sequence
ttatacacatgctggtaaccttatt

SEQ ID NO: 263786 - DNA, 25 bp, Probe sequence
atgactttccaatcgatagtttgtt

SEQ ID NO: 263787 - DNA, 25 bp, Probe sequence
atgggtagtttattttctgaaatca

SEQ ID NO: 263788 - DNA, 25 bp, Probe sequence
agacagattttatcaaatgctttga

SEQ ID NO: 263789 - DNA, 25 bp, Probe sequence
acgagattagagtcgcaacgtaaag

SEQ ID NO: 263790 - DNA, 25 bp, Probe sequence
acaacggttaaattgatcttcccat

SEQ ID NO: 263791 - DNA, 25 bp, Probe sequence
aactcgatgttagatacgcaattgt

SEQ ID NO: 263792 - DNA, 25 bp, Probe sequence
aagcgctattatttgaatggtcacg

SEQ ID NO: 263793 - DNA, 25 bp, Probe sequence
aagcttaacactgatttttcttata

SEQ ID NO: 263794 - DNA, 25 bp, Probe sequence
aagatatgttttttgattatgtctc

SEQ ID NO: 263795 - DNA, 25 bp, Probe sequence
aagtggtcgaccaacagttgcaatt

SEQ ID NO: 263796 - DNA, 25 bp, Probe sequence
caccagtgactgctatgaaattgtt

SEQ ID NO: 263797 - DNA, 25 bp, Probe sequence
catcatccggcatgggtctatactt

SEQ ID NO: 263798 - DNA, 25 bp, Probe sequence
cgatagtttgttttatattgtttct

SEQ ID NO: 263799 - DNA, 25 bp, Probe sequence
gcgcataaagataaagtggtcgacc

SEQ ID NO: 263800 - DNA, 25 bp, Probe sequence
gaattggatattttggatactgttt

SEQ ID NO: 263801 - DNA, 25 bp, Probe sequence
gaatggtcacgtattaactcgatgt

SEQ ID NO: 263802 - DNA, 25 bp, Probe sequence
gaaacgacatcatccggcatgggtc

SEQ ID NO: 263803 - DNA, 25 bp, Probe sequence
gatcaacatgttgcgttaatcatca

SEQ ID NO: 263804 - DNA, 25 bp, Probe sequence
gatactgtttttaaatattcttatg

SEQ ID NO: 263805 - DNA, 25 bp, Probe sequence
gattatgtctcattgaagcgcatgg

SEQ ID NO: 263806 - DNA, 25 bp, Probe sequence
gttgcgttaatcatcaaggatcatg

SEQ ID NO: 263807 - DNA, 25 bp, Probe sequence
gtcttattgactatgactttccaat

SEQ ID NO: 263808 - DNA, 25 bp, Probe sequence
gtctcattgaagcgcatggttattg

SEQ ID NO: 263809 - DNA, 25 bp, Probe sequence
gtgcacgacatcaaaacaccagtga

SEQ ID NO: 263810 - DNA, 25 bp, Probe sequence
gtggataatcatgtgtacacggata

SEQ ID NO: 263811 - DNA, 25 bp, Probe sequence
ggcatgggtctatacttagtggata

SEQ ID NO: 263812 - DNA, 25 bp, Probe sequence
tgaacgtgggtttacgtcaacggct

SEQ ID NO: 263813 - DNA, 25 bp, Probe sequence
tgatttttcttatattgactttttt

SEQ ID NO: 263814 - DNA, 25 bp, Probe sequence
taagtcaagttaaaggtatcggatt

SEQ ID NO: 263815 - DNA, 25 bp, Probe sequence
taaattgatcttcccattacaaaat

SEQ ID NO: 263816 - DNA, 25 bp, Probe sequence
tatgcctcgaatatttgaacgtggg

SEQ ID NO: 263817 - DNA, 25 bp, Probe sequence
tatatcgtcaaattttagcgcataa

SEQ ID NO: 263818 - DNA, 25 bp, Probe sequence
ttacaagttacttcgactattggaa

SEQ ID NO: 263819 - DNA, 25 bp, Probe sequence
ttgttgagcgcatgtcagaagtgac

SEQ ID NO: 263820 - DNA, 25 bp, Probe sequence
atttcgcaaggttctatcacactaa

SEQ ID NO: 263821 - DNA, 25 bp, Probe sequence
atattcacggagttatatcaaggtg

SEQ ID NO: 263822 - DNA, 25 bp, Probe sequence
atcatgttaccattaacggttcaga

SEQ ID NO: 263823 - DNA, 25 bp, Probe sequence
atccgaattgtctggtggtcaaaga

SEQ ID NO: 263824 - DNA, 25 bp, Probe sequence
aggacacaaacttgaaaagctttca

SEQ ID NO: 263825 - DNA, 25 bp, Probe sequence
aggacacaatgttagatcgttatga

SEQ ID NO: 263826 - DNA, 25 bp, Probe sequence
agatgggcaaatattcacggagtta

SEQ ID NO: 263827 - DNA, 25 bp, Probe sequence
acgaacatcagctgccagagcattt

SEQ ID NO: 263828 - DNA, 25 bp, Probe sequence
gaccttattaaatgttttgagttca

SEQ ID NO: 263829 - DNA, 25 bp, Probe sequence
aagacaacgaacatcagctgccaga

SEQ ID NO: 263830 - DNA, 25 bp, Probe sequence
aagacgacaattattatggtgacac

SEQ ID NO: 263831 - DNA, 25 bp, Probe sequence
aatttacttcatacattaactgtta

SEQ ID NO: 263832 - DNA, 25 bp, Probe sequence
caaacaaagcattatctgatattcg

SEQ ID NO: 263833 - DNA, 25 bp, Probe sequence
caggatctggtaaaacgaccttatt

SEQ ID NO: 263834 - DNA, 25 bp, Probe sequence
catcagctgccagagcatttataac

SEQ ID NO: 263835 - DNA, 25 bp, Probe sequence
ctattatatttgccgatgaacctac

SEQ ID NO: 263836 - DNA, 25 bp, Probe sequence
cctacaggtgcactcgattcgaaaa

SEQ ID NO: 263837 - DNA, 25 bp, Probe sequence
gcatttataacattgccttctatta

SEQ ID NO: 263838 - DNA, 25 bp, Probe sequence
gcattatctgatattcgaaagcatg

SEQ ID NO: 263839 - DNA, 25 bp, Probe sequence
gcagctagctatgcaaatcgagtag

SEQ ID NO: 263840 - DNA, 25 bp, Probe sequence
gaaggtgaatttattgccattatgg

SEQ ID NO: 263841 - DNA, 25 bp, Probe sequence
gacatcagtgataaatatccatccg

SEQ ID NO: 263842 - DNA, 25 bp, Probe sequence
gatgacaaacatactttctttaaag

SEQ ID NO: 263843 - DNA, 25 bp, Probe sequence
gattatatttcgcaaggttctatca

SEQ ID NO: 263844 - DNA, 25 bp, Probe sequence
gtagtgatgcttaaagatgggcaaa

SEQ ID NO: 263845 - DNA, 25 bp, Probe sequence
gggaccttcaggatctggtaaaacg

SEQ ID NO: 263846 - DNA, 25 bp, Probe sequence
ggtgatgatgacaaacatactttct

SEQ ID NO: 263847 - DNA, 25 bp, Probe sequence
ggtgcactcgattcgaaaagtacac

SEQ ID NO: 263848 - DNA, 25 bp, Probe sequence
ggttctatcacactaaaaggacaca

SEQ ID NO: 263849 - DNA, 25 bp, Probe sequence
tgatccggttgcagctagctatgca

SEQ ID NO: 263850 - DNA, 25 bp, Probe sequence
tatccatccgaattgtctggtggtc

SEQ ID NO: 263851 - DNA, 25 bp, Probe sequence
tatggcaacaagaaaatggcacaag

SEQ ID NO: 263852 - DNA, 25 bp, Probe sequence
tattatggtgacacatgatccggtt

SEQ ID NO: 263853 - DNA, 25 bp, Probe sequence
ttgccattatgggaccttcaggatc

SEQ ID NO: 263854 - DNA, 25 bp, Probe sequence
attctgtattctcccaatgctaaag

SEQ ID NO: 263855 - DNA, 25 bp, Probe sequence
attaccgagttgttgaattacttga

SEQ ID NO: 263856 - DNA, 25 bp, Probe sequence
attacacgtcaaactatatatagaa

SEQ ID NO: 263857 - DNA, 25 bp, Probe sequence
agctcaagggattcaagtcgccaaa

SEQ ID NO: 263858 - DNA, 25 bp, Probe sequence
acaagctcaagggattcaagtcgcc

SEQ ID NO: 263859 - DNA, 25 bp, Probe sequence
aagctcaagggattcaagtcgccaa

SEQ ID NO: 263860 - DNA, 25 bp, Probe sequence
aagggagacctattctgtattctcc

SEQ ID NO: 263861 - DNA, 25 bp, Probe sequence
aattttagcaatgatttcagaacaa

SEQ ID NO: 263862 - DNA, 25 bp, Probe sequence
caagggattcaagtcgccaaagaaa

SEQ ID NO: 263863 - DNA, 25 bp, Probe sequence
ctcaagggattcaagtcgccaaaga

SEQ ID NO: 263864 - DNA, 25 bp, Probe sequence
ctgtattctcccaatgctaaagacc

SEQ ID NO: 263865 - DNA, 25 bp, Probe sequence
gctcaagggattcaagtcgccaaag

SEQ ID NO: 263866 - DNA, 25 bp, Probe sequence
gctaaagaagttggtattacacgtc

SEQ ID NO: 263867 - DNA, 25 bp, Probe sequence
gaatgaagtcattggaaatccacta

SEQ ID NO: 263868 - DNA, 25 bp, Probe sequence
gaagtcattggaaatccactactag

SEQ ID NO: 263869 - DNA, 25 bp, Probe sequence
gaagttggtattacacgtcaaacta

SEQ ID NO: 263870 - DNA, 25 bp, Probe sequence
gaacagggtaaatctataagtacta

SEQ ID NO: 263871 - DNA, 25 bp, Probe sequence
gagacctattctgtattctcccaat

SEQ ID NO: 263872 - DNA, 25 bp, Probe sequence
gttggtattacacgtcaaactatat

SEQ ID NO: 263873 - DNA, 25 bp, Probe sequence
gttgttgaattacttgaacagggta

SEQ ID NO: 263874 - DNA, 25 bp, Probe sequence
gtattctcccaatgctaaagaccca

SEQ ID NO: 263875 - DNA, 25 bp, Probe sequence
gtactatagctaaagaagttggtat

SEQ ID NO: 263876 - DNA, 25 bp, Probe sequence
gtcattggaaatccactactagata

SEQ ID NO: 263877 - DNA, 25 bp, Probe sequence
gggattcaagtcgccaaagaaaaag

SEQ ID NO: 263878 - DNA, 25 bp, Probe sequence
ggtattacacgtcaaactatatata

SEQ ID NO: 263879 - DNA, 25 bp, Probe sequence
ggagacctattctgtattctcccaa

SEQ ID NO: 263880 - DNA, 25 bp, Probe sequence
ggaaatccactactagataaattta

SEQ ID NO: 263881 - DNA, 25 bp, Probe sequence
tgctaaagacccacaaaagcgttta

SEQ ID NO: 263882 - DNA, 25 bp, Probe sequence
tcaagtcgccaaagaaaaaggtata

SEQ ID NO: 263883 - DNA, 25 bp, Probe sequence
taaagggagacctattctgtattct

SEQ ID NO: 263884 - DNA, 25 bp, Probe sequence
taccgagttgttgaattacttgaac

SEQ ID NO: 263885 - DNA, 25 bp, Probe sequence
tattctgtattctcccaatgctaaa

SEQ ID NO: 263886 - DNA, 25 bp, Probe sequence
ttagtttattaccgagttgttgaat

SEQ ID NO: 263887 - DNA, 25 bp, Probe sequence
ttctgtattctcccaatgctaaaga

SEQ ID NO: 263888 - DNA, 25 bp, Probe sequence
atccagcttcaaaacaagttgacaa

SEQ ID NO: 263889 - DNA, 25 bp, Probe sequence
agacccagaggtgaatagatttatt

SEQ ID NO: 263890 - DNA, 25 bp, Probe sequence
acccatctcaatctcaatcgttaat

SEQ ID NO: 263891 - DNA, 25 bp, Probe sequence
actattaaaccatcagaagcaccta

SEQ ID NO: 263892 - DNA, 25 bp, Probe sequence
aaatcatcattttgcagttcctgga

SEQ ID NO: 263893 - DNA, 25 bp, Probe sequence
aaaccatcgtttcattactacgcaa

SEQ ID NO: 263894 - DNA, 25 bp, Probe sequence
aaacatttctcattttcaaaatcac

SEQ ID NO: 263895 - DNA, 25 bp, Probe sequence
aagattgcagatccatcggcagcta

SEQ ID NO: 263896 - DNA, 25 bp, Probe sequence
aagcacctagatatacacacccatc

SEQ ID NO: 263897 - DNA, 25 bp, Probe sequence
aagtaatagccctacacacgttgtt

SEQ ID NO: 263898 - DNA, 25 bp, Probe sequence
aatagttttaaggtcattccatcat

SEQ ID NO: 263899 - DNA, 25 bp, Probe sequence
aattattccaacttacgatgaattt

SEQ ID NO: 263900 - DNA, 25 bp, Probe sequence
caaatcacgctaatgcatcaacaga

SEQ ID NO: 263901 - DNA, 25 bp, Probe sequence
catgcaacatcttctatccatcatc

SEQ ID NO: 263902 - DNA, 25 bp, Probe sequence
cttctatccatcatcactttactat

SEQ ID NO: 263903 - DNA, 25 bp, Probe sequence
ctgttccaagtaatagccctacaca

SEQ ID NO: 263904 - DNA, 25 bp, Probe sequence
gcagttcctggataccatggtcata

SEQ ID NO: 263905 - DNA, 25 bp, Probe sequence
gcagatccatcggcagctagtaaaa

SEQ ID NO: 263906 - DNA, 25 bp, Probe sequence
gcaaattgttgctaaagacccagag

SEQ ID NO: 263907 - DNA, 25 bp, Probe sequence
gacaacaaaaactttgtagcttctg

SEQ ID NO: 263908 - DNA, 25 bp, Probe sequence
gataccatggtcataaagttgtaac

SEQ ID NO: 263909 - DNA, 25 bp, Probe sequence
gtattagaattcatcacttttgtgc

SEQ ID NO: 263910 - DNA, 25 bp, Probe sequence
gtagttccagaatcgggtattaata

SEQ ID NO: 263911 - DNA, 25 bp, Probe sequence
gtaacaccaggacaagctagtatta

SEQ ID NO: 263912 - DNA, 25 bp, Probe sequence
gtaaaccatgcaacatcttctatcc

SEQ ID NO: 263913 - DNA, 25 bp, Probe sequence
ggtcattccatcatatggtcacaat

SEQ ID NO: 263914 - DNA, 25 bp, Probe sequence
tgtgctgtacctcaaataaatagtt

SEQ ID NO: 263915 - DNA, 25 bp, Probe sequence
tcatcacttttgtgctgtacctcaa

SEQ ID NO: 263916 - DNA, 25 bp, Probe sequence
taaaaactttgccgtaccagaatca

SEQ ID NO: 263917 - DNA, 25 bp, Probe sequence
tacacacgttgttcctgagtttcag

SEQ ID NO: 263918 - DNA, 25 bp, Probe sequence
tatccatcatcactttactattaaa

SEQ ID NO: 263919 - DNA, 25 bp, Probe sequence
ttaggaatcattgtaccagagtata

SEQ ID NO: 263920 - DNA, 25 bp, Probe sequence
tatttgctacacaatttatgaattc

SEQ ID NO: 263921 - DNA, 25 bp, Probe sequence
ttcagggtatcttaccagcaccacg

SEQ ID NO: 263922 - DNA, 25 bp, Probe sequence
attgaatgatttagcagtttttact

SEQ ID NO: 263923 - DNA, 25 bp, Probe sequence
attctattaagactatgacaattgt

SEQ ID NO: 263924 - DNA, 25 bp, Probe sequence
ataattctattaagactatgacaat

SEQ ID NO: 263925 - DNA, 25 bp, Probe sequence
atgatttagcagtttttactattaa

SEQ ID NO: 263926 - DNA, 25 bp, Probe sequence
agcaaccgaattattatttgacagt

SEQ ID NO: 263927 - DNA, 25 bp, Probe sequence
agcagtttttactattaataattct

SEQ ID NO: 263928 - DNA, 25 bp, Probe sequence
aaatgatagcaaacttattaataga

SEQ ID NO: 263929 - DNA, 25 bp, Probe sequence
aaagcaaccgaattattatttgaca

SEQ ID NO: 263930 - DNA, 25 bp, Probe sequence
aaaatctctagatgtaattagtaca

SEQ ID NO: 263931 - DNA, 25 bp, Probe sequence
aagcaaccgaattattatttgacag

SEQ ID NO: 263932 - DNA, 25 bp, Probe sequence
aagactatgacaattgtaactaata

SEQ ID NO: 263933 - DNA, 25 bp, Probe sequence
aatgatttagcagtttttactatta

SEQ ID NO: 263934 - DNA, 25 bp, Probe sequence
aatctctagatgtaattagtacaaa

SEQ ID NO: 263935 - DNA, 25 bp, Probe sequence
caattgtaactaataaaggacgtat

SEQ ID NO: 263936 - DNA, 25 bp, Probe sequence
caaccgaattattatttgacagtaa

SEQ ID NO: 263937 - DNA, 25 bp, Probe sequence
cagtttttactattaataattctat

SEQ ID NO: 263938 - DNA, 25 bp, Probe sequence
cattgaatgatttagcagtttttac

SEQ ID NO: 263939 - DNA, 25 bp, Probe sequence
gcagtttttactattaataattcta

SEQ ID NO: 263940 - DNA, 25 bp, Probe sequence
gcaaacttattaatagaaaaatctc

SEQ ID NO: 263941 - DNA, 25 bp, Probe sequence
gcaaccgaattattatttgacagta

SEQ ID NO: 263942 - DNA, 25 bp, Probe sequence
gaatgatttagcagtttttactatt

SEQ ID NO: 263943 - DNA, 25 bp, Probe sequence
gaagtagcttatttattaaaaggtg

SEQ ID NO: 263944 - DNA, 25 bp, Probe sequence
gacaattgtaactaataaaggacgt

SEQ ID NO: 263945 - DNA, 25 bp, Probe sequence
gactatgacaattgtaactaataaa

SEQ ID NO: 263946 - DNA, 25 bp, Probe sequence
gatttagcagtttttactattaata

SEQ ID NO: 263947 - DNA, 25 bp, Probe sequence
tgatttagcagtttttactattaat

SEQ ID NO: 263948 - DNA, 25 bp, Probe sequence
tgaatgatttagcagtttttactat

SEQ ID NO: 263949 - DNA, 25 bp, Probe sequence
taagtaagacagaacattttaaaga

SEQ ID NO: 263950 - DNA, 25 bp, Probe sequence
tattaagactatgacaattgtaact

SEQ ID NO: 263951 - DNA, 25 bp, Probe sequence
tttagcagtttttactattaataat

SEQ ID NO: 263952 - DNA, 25 bp, Probe sequence
ttaagactatgacaattgtaactaa

SEQ ID NO: 263953 - DNA, 25 bp, Probe sequence
ttcattgaatgatttagcagttttt

SEQ ID NO: 263954 - DNA, 25 bp, Probe sequence
ttctattaagactatgacaattgta

SEQ ID NO: 263955 - DNA, 25 bp, Probe sequence
ttgaatgatttagcagtttttacta

SEQ ID NO: 263956 - DNA, 25 bp, Probe sequence
ataactatcctggccaatcaggatt

SEQ ID NO: 263957 - DNA, 25 bp, Probe sequence
atcctggccaatcaggattttcaga

SEQ ID NO: 263958 - DNA, 25 bp, Probe sequence
atgttacataactatcctggccaat

SEQ ID NO: 263959 - DNA, 25 bp, Probe sequence
agtcagataggtttcaaggtaaaat

SEQ ID NO: 263960 - DNA, 25 bp, Probe sequence
accaagtcagataggtttcaaggta

SEQ ID NO: 263961 - DNA, 25 bp, Probe sequence
actatcctggccaatcaggattttc

SEQ ID NO: 263962 - DNA, 25 bp, Probe sequence
acataactatcctggccaatcagga

SEQ ID NO: 263963 - DNA, 25 bp, Probe sequence
aactatcctggccaatcaggatttt

SEQ ID NO: 263964 - DNA, 25 bp, Probe sequence
caagtcagataggtttcaaggtaaa

SEQ ID NO: 263965 - DNA, 25 bp, Probe sequence
cagataggtttcaaggtaaaatagt

SEQ ID NO: 263966 - DNA, 25 bp, Probe sequence
cataactatcctggccaatcaggat

SEQ ID NO: 263967 - DNA, 25 bp, Probe sequence
ctatcctggccaatcaggattttca

SEQ ID NO: 263968 - DNA, 25 bp, Probe sequence
ccaagtcagataggtttcaaggtaa

SEQ ID NO: 263969 - DNA, 25 bp, Probe sequence
gttacataactatcctggccaatca

SEQ ID NO: 263970 - DNA, 25 bp, Probe sequence
gttatgttacataactatcctggcc

SEQ ID NO: 263971 - DNA, 25 bp, Probe sequence
gtcagataggtttcaaggtaaaata

SEQ ID NO: 263972 - DNA, 25 bp, Probe sequence
tcagataggtttcaaggtaaaatag

SEQ ID NO: 263973 - DNA, 25 bp, Probe sequence
tgttacataactatcctggccaatc

SEQ ID NO: 263974 - DNA, 25 bp, Probe sequence
tcctggccaatcaggattttcagaa

SEQ ID NO: 263975 - DNA, 25 bp, Probe sequence
taccaagtcagataggtttcaaggt

SEQ ID NO: 263976 - DNA, 25 bp, Probe sequence
taactatcctggccaatcaggattt

SEQ ID NO: 263977 - DNA, 25 bp, Probe sequence
tacataactatcctggccaatcagg

SEQ ID NO: 263978 - DNA, 25 bp, Probe sequence
tatgttacataactatcctggccaa

SEQ ID NO: 263979 - DNA, 25 bp, Probe sequence
tatcctggccaatcaggattttcag

SEQ ID NO: 263980 - DNA, 25 bp, Probe sequence
ttatgttacataactatcctggcca

SEQ ID NO: 263981 - DNA, 25 bp, Probe sequence
ttaccaagtcagataggtttcaagg

SEQ ID NO: 263982 - DNA, 25 bp, Probe sequence
ttacataactatcctggccaatcag

SEQ ID NO: 263983 - DNA, 25 bp, Probe sequence
attttcaactgctgattcatcggtg

SEQ ID NO: 263984 - DNA, 25 bp, Probe sequence
ataggcgcattcaatgaagatcatt

SEQ ID NO: 263985 - DNA, 25 bp, Probe sequence
atctcatcatttattccaattttca

SEQ ID NO: 263986 - DNA, 25 bp, Probe sequence
atcgattgctaagacctgttaaagg

SEQ ID NO: 263987 - DNA, 25 bp, Probe sequence
atccatctcatcatttattccaatt

SEQ ID NO: 263988 - DNA, 25 bp, Probe sequence
agacctgttaaaggtacaacataca

SEQ ID NO: 263989 - DNA, 25 bp, Probe sequence
actgtactgaaatcaccttcaatat

SEQ ID NO: 263990 - DNA, 25 bp, Probe sequence
actgctgattcatcggtgatttttg

SEQ ID NO: 263991 - DNA, 25 bp, Probe sequence
actgaaatcaccttcaatatatgaa

SEQ ID NO: 263992 - DNA, 25 bp, Probe sequence
actttggctttgctgatcgacaaac

SEQ ID NO: 263993 - DNA, 25 bp, Probe sequence
aaaaatcaataatccatctcatcat

SEQ ID NO: 263994 - DNA, 25 bp, Probe sequence
aaaatttactttggctttgctgatc

SEQ ID NO: 263995 - DNA, 25 bp, Probe sequence
aagttatcgattgctaagacctgtt

SEQ ID NO: 263996 - DNA, 25 bp, Probe sequence
attccgtcaactgaagaccatgttt

SEQ ID NO: 263997 - DNA, 25 bp, Probe sequence
catcggtgatttttgaagagactga

SEQ ID NO: 263998 - DNA, 25 bp, Probe sequence
ccgtcaactgaagaccatgtttatc

SEQ ID NO: 263999 - DNA, 25 bp, Probe sequence
gctgatcgacaaacttatgaagact

SEQ ID NO: 264000 - DNA, 25 bp, Probe sequence
gcaatttttattccgtcaactgaag

SEQ ID NO: 264001 - DNA, 25 bp, Probe sequence
gaagactttaaaaattctgatgctt

SEQ ID NO: 264002 - DNA, 25 bp, Probe sequence
gaagatcatttttattgcgcaattt

SEQ ID NO: 264003 - DNA, 25 bp, Probe sequence
gaagaccatgtttatcaacttgaaa

SEQ ID NO: 264004 - DNA, 25 bp, Probe sequence
gaaaatactgtactgaaatcacctt

SEQ ID NO: 264005 - DNA, 25 bp, Probe sequence
gagactgaagaaaatactgtactga

SEQ ID NO: 264006 - DNA, 25 bp, Probe sequence
gatgcttttaaagatcatttttcaa

SEQ ID NO: 264007 - DNA, 25 bp, Probe sequence
gtggctttaaaagttatcgattgct

SEQ ID NO: 264008 - DNA, 25 bp, Probe sequence
ggctttgctgatcgacaaacttatg

SEQ ID NO: 264009 - DNA, 25 bp, Probe sequence
tgcgcaatttttattccgtcaactg

SEQ ID NO: 264010 - DNA, 25 bp, Probe sequence
tccaattttcaactgctgattcatc

SEQ ID NO: 264011 - DNA, 25 bp, Probe sequence
tcaactgctgattcatcggtgattt

SEQ ID NO: 264012 - DNA, 25 bp, Probe sequence
taatcagtgttgatgacaatttcaa

SEQ ID NO: 264013 - DNA, 25 bp, Probe sequence
taatccatctcatcatttattccaa

SEQ ID NO: 264014 - DNA, 25 bp, Probe sequence
tttactttggctttgctgatcgaca

SEQ ID NO: 264015 - DNA, 25 bp, Probe sequence
tttattccaattttcaactgctgat

SEQ ID NO: 264016 - DNA, 25 bp, Probe sequence
ttattgcgcaatttttattccgtca

SEQ ID NO: 264017 - DNA, 25 bp, Probe sequence
attttatatcgtatttcttattatt

SEQ ID NO: 264018 - DNA, 25 bp, Probe sequence
atttcttattattatatggctgaat

SEQ ID NO: 264019 - DNA, 25 bp, Probe sequence
atatcgtatttcttattattatatg

SEQ ID NO: 264020 - DNA, 25 bp, Probe sequence
atacactgactgttttaataacaac

SEQ ID NO: 264021 - DNA, 25 bp, Probe sequence
atcgtatttcttattattatatggc

SEQ ID NO: 264022 - DNA, 25 bp, Probe sequence
atccatacactgactgttttaataa

SEQ ID NO: 264023 - DNA, 25 bp, Probe sequence
atggctgaatatatttttaggaaat

SEQ ID NO: 264024 - DNA, 25 bp, Probe sequence
actattttatatcgtatttcttatt

SEQ ID NO: 264025 - DNA, 25 bp, Probe sequence
acactgactgttttaataacaacat

SEQ ID NO: 264026 - DNA, 25 bp, Probe sequence
aactattttatatcgtatttcttat

SEQ ID NO: 264027 - DNA, 25 bp, Probe sequence
cactgactgttttaataacaacatt

SEQ ID NO: 264028 - DNA, 25 bp, Probe sequence
catacactgactgttttaataacaa

SEQ ID NO: 264029 - DNA, 25 bp, Probe sequence
ctattttatatcgtatttcttatta

SEQ ID NO: 264030 - DNA, 25 bp, Probe sequence
cgtatttcttattattatatggctg

SEQ ID NO: 264031 - DNA, 25 bp, Probe sequence
ccatacactgactgttttaataaca

SEQ ID NO: 264032 - DNA, 25 bp, Probe sequence
gaaaggggattaaaaatgacagagt

SEQ ID NO: 264033 - DNA, 25 bp, Probe sequence
gtatttcttattattatatggctga

SEQ ID NO: 264034 - DNA, 25 bp, Probe sequence
ggggattaaaaatgacagagttgaa

SEQ ID NO: 264035 - DNA, 25 bp, Probe sequence
ggctgaatatatttttaggaaatga

SEQ ID NO: 264036 - DNA, 25 bp, Probe sequence
tccatacactgactgttttaataac

SEQ ID NO: 264037 - DNA, 25 bp, Probe sequence
tcgtatttcttattattatatggct

SEQ ID NO: 264038 - DNA, 25 bp, Probe sequence
tacactgactgttttaataacaaca

SEQ ID NO: 264039 - DNA, 25 bp, Probe sequence
tattgttaattcaagaaaggggatt

SEQ ID NO: 264040 - DNA, 25 bp, Probe sequence
tatggctgaatatatttttaggaaa

SEQ ID NO: 264041 - DNA, 25 bp, Probe sequence
tatcgtatttcttattattatatgg

SEQ ID NO: 264042 - DNA, 25 bp, Probe sequence
tatattgttaattcaagaaagggga

SEQ ID NO: 264043 - DNA, 25 bp, Probe sequence
tatatcgtatttcttattattatat

SEQ ID NO: 264044 - DNA, 25 bp, Probe sequence
tatttcttattattatatggctgaa

SEQ ID NO: 264045 - DNA, 25 bp, Probe sequence
tattttatatcgtatttcttattat

SEQ ID NO: 264046 - DNA, 25 bp, Probe sequence
tttcttattattatatggctgaata

SEQ ID NO: 264047 - DNA, 25 bp, Probe sequence
tttatatcgtatttcttattattat

SEQ ID NO: 264048 - DNA, 25 bp, Probe sequence
ttttatatcgtatttcttattatta

SEQ ID NO: 264049 - DNA, 25 bp, Probe sequence
ttatatcgtatttcttattattata

SEQ ID NO: 264050 - DNA, 25 bp, Probe sequence
ttcttattattatatggctgaatat

SEQ ID NO: 264051 - DNA, 25 bp, Probe sequence
attaccttcagatgcagacgtttca

SEQ ID NO: 264052 - DNA, 25 bp, Probe sequence
attagccgattctgataaaattatt

SEQ ID NO: 264053 - DNA, 25 bp, Probe sequence
attagtttaattgccatcatgttga

SEQ ID NO: 264054 - DNA, 25 bp, Probe sequence
ataaattagccgattctgataaaat

SEQ ID NO: 264055 - DNA, 25 bp, Probe sequence
atgacgatgtaccacatggtttaat

SEQ ID NO: 264056 - DNA, 25 bp, Probe sequence
agtttaattgccatcatgttgattg

SEQ ID NO: 264057 - DNA, 25 bp, Probe sequence
agttgatcatgacgatgtaccacat

SEQ ID NO: 264058 - DNA, 25 bp, Probe sequence
accttcagatgcagacgtttcagtt

SEQ ID NO: 264059 - DNA, 25 bp, Probe sequence
aaagttgatcatgacgatgtaccac

SEQ ID NO: 264060 - DNA, 25 bp, Probe sequence
aattaccttcagatgcagacgtttc

SEQ ID NO: 264061 - DNA, 25 bp, Probe sequence
aattgccatcatgttgattgtatgt

SEQ ID NO: 264062 - DNA, 25 bp, Probe sequence
cagatgcagacgtttcagttaaaaa

SEQ ID NO: 264063 - DNA, 25 bp, Probe sequence
cttcagatgcagacgtttcagttaa

SEQ ID NO: 264064 - DNA, 25 bp, Probe sequence
ccttcagatgcagacgtttcagtta

SEQ ID NO: 264065 - DNA, 25 bp, Probe sequence
gcagacgtttcagttaaaaaaggcg

SEQ ID NO: 264066 - DNA, 25 bp, Probe sequence
gaattatgaaagacaatgctacaat

SEQ ID NO: 264067 - DNA, 25 bp, Probe sequence
gaaagacaatgctacaattgaaaaa

SEQ ID NO: 264068 - DNA, 25 bp, Probe sequence
gacgatgtaccacatggtttaatga

SEQ ID NO: 264069 - DNA, 25 bp, Probe sequence
gatgaaagcattgagaagaacgtta

SEQ ID NO: 264070 - DNA, 25 bp, Probe sequence
gatgcagacgtttcagttaaaaaag

SEQ ID NO: 264071 - DNA, 25 bp, Probe sequence
gatcatgacgatgtaccacatggtt

SEQ ID NO: 264072 - DNA, 25 bp, Probe sequence
gttgattgtatgtattgtactagta

SEQ ID NO: 264073 - DNA, 25 bp, Probe sequence
gtttataaattagccgattctgata

SEQ ID NO: 264074 - DNA, 25 bp, Probe sequence
tgtaccacatggtttaatgatgaaa

SEQ ID NO: 264075 - DNA, 25 bp, Probe sequence
tgattgtatgtattgtactagtaat

SEQ ID NO: 264076 - DNA, 25 bp, Probe sequence
tgagaagaacgttaaattaccttca

SEQ ID NO: 264077 - DNA, 25 bp, Probe sequence
tcatgacgatgtaccacatggttta

SEQ ID NO: 264078 - DNA, 25 bp, Probe sequence
taccttcagatgcagacgtttcagt

SEQ ID NO: 264079 - DNA, 25 bp, Probe sequence
tagccgattctgataaaattattaa

SEQ ID NO: 264080 - DNA, 25 bp, Probe sequence
ttaccttcagatgcagacgtttcag

SEQ ID NO: 264081 - DNA, 25 bp, Probe sequence
ttagtttaattgccatcatgttgat

SEQ ID NO: 264082 - DNA, 25 bp, Probe sequence
ttaattgccatcatgttgattgtat

SEQ ID NO: 264083 - DNA, 25 bp, Probe sequence
ttcagatgcagacgtttcagttaaa

SEQ ID NO: 264084 - DNA, 25 bp, Probe sequence
ttgccatcatgttgattgtatgtat

SEQ ID NO: 264085 - DNA, 25 bp, Probe sequence
atatcatgagcgtgtgttagcactg

SEQ ID NO: 264086 - DNA, 25 bp, Probe sequence
atcatgagcgtgtgttagcactgag

SEQ ID NO: 264087 - DNA, 25 bp, Probe sequence
atgagcgtgtgttagcactgagagc

SEQ ID NO: 264088 - DNA, 25 bp, Probe sequence
agtgcacatgatgcccaagtgaaac

SEQ ID NO: 264089 - DNA, 25 bp, Probe sequence
aaagaactgcatttgattttagatt

SEQ ID NO: 264090 - DNA, 25 bp, Probe sequence
aaaagccgagaaagcatttcgacac

SEQ ID NO: 264091 - DNA, 25 bp, Probe sequence
aaaattagatgatgtaagaatgccc

SEQ ID NO: 264092 - DNA, 25 bp, Probe sequence
aactgcatttgattttagattcgag

SEQ ID NO: 264093 - DNA, 25 bp, Probe sequence
aatgttgtgtattcatacaatggca

SEQ ID NO: 264094 - DNA, 25 bp, Probe sequence
caagtgcacatgatgcccaagtgaa

SEQ ID NO: 264095 - DNA, 25 bp, Probe sequence
catgatgcccaagtgaaactgtata

SEQ ID NO: 264096 - DNA, 25 bp, Probe sequence
cttctcaagtgcacatgatgcccaa

SEQ ID NO: 264097 - DNA, 25 bp, Probe sequence
ctcaagtgcacatgatgcccaagtg

SEQ ID NO: 264098 - DNA, 25 bp, Probe sequence
cccttctcaagtgcacatgatgccc

SEQ ID NO: 264099 - DNA, 25 bp, Probe sequence
ccttctcaagtgcacatgatgccca

SEQ ID NO: 264100 - DNA, 25 bp, Probe sequence
gcccttctcaagtgcacatgatgcc

SEQ ID NO: 264101 - DNA, 25 bp, Probe sequence
gcgtgtgttagcactgagagcagaa

SEQ ID NO: 264102 - DNA, 25 bp, Probe sequence
gcatttgattttagattcgaggatt

SEQ ID NO: 264103 - DNA, 25 bp, Probe sequence
gcacatgatgcccaagtgaaactgt

SEQ ID NO: 264104 - DNA, 25 bp, Probe sequence
gaaactgtataatgttgtgtattca

SEQ ID NO: 264105 - DNA, 25 bp, Probe sequence
gagcgtgtgttagcactgagagcag

SEQ ID NO: 264106 - DNA, 25 bp, Probe sequence
gatgcccaagtgaaactgtataatg

SEQ ID NO: 264107 - DNA, 25 bp, Probe sequence
gtgcacatgatgcccaagtgaaact

SEQ ID NO: 264108 - DNA, 25 bp, Probe sequence
gtgttagcactgagagcagaaagta

SEQ ID NO: 264109 - DNA, 25 bp, Probe sequence
gtgtattcatacaatggcattaaac

SEQ ID NO: 264110 - DNA, 25 bp, Probe sequence
gtgtgttagcactgagagcagaaag

SEQ ID NO: 264111 - DNA, 25 bp, Probe sequence
tgcccttctcaagtgcacatgatgc

SEQ ID NO: 264112 - DNA, 25 bp, Probe sequence
tctcaagtgcacatgatgcccaagt

SEQ ID NO: 264113 - DNA, 25 bp, Probe sequence
tcatgagcgtgtgttagcactgaga

SEQ ID NO: 264114 - DNA, 25 bp, Probe sequence
tcaagtgcacatgatgcccaagtga

SEQ ID NO: 264115 - DNA, 25 bp, Probe sequence
tagattcgaggatttatttagcaaa

SEQ ID NO: 264116 - DNA, 25 bp, Probe sequence
tttcgacacgaaatcaaaaaattag

SEQ ID NO: 264117 - DNA, 25 bp, Probe sequence
ttcatacaatggcattaaacgtaat

SEQ ID NO: 264118 - DNA, 25 bp, Probe sequence
ttctcaagtgcacatgatgcccaag

SEQ ID NO: 264119 - DNA, 25 bp, Probe sequence
attccgcgctattttcaacagtgag

SEQ ID NO: 264120 - DNA, 25 bp, Probe sequence
attaaattattatgcgactcgcttt

SEQ ID NO: 264121 - DNA, 25 bp, Probe sequence
atttggacgtgctacaatgtttgaa

SEQ ID NO: 264122 - DNA, 25 bp, Probe sequence
atatctgtagatatcgatgcacttt

SEQ ID NO: 264123 - DNA, 25 bp, Probe sequence
ataatcaaacacatcctgattcagt

SEQ ID NO: 264124 - DNA, 25 bp, Probe sequence
acttgttgtttctattaataatgtc

SEQ ID NO: 264125 - DNA, 25 bp, Probe sequence
aaatgtaacaattagtcgacttgaa

SEQ ID NO: 264126 - DNA, 25 bp, Probe sequence
aacacatttttcaaagcatatttac

SEQ ID NO: 264127 - DNA, 25 bp, Probe sequence
aacacatcctgattcagtatttgta

SEQ ID NO: 264128 - DNA, 25 bp, Probe sequence
aacccagaattaatgtcggctacca

SEQ ID NO: 264129 - DNA, 25 bp, Probe sequence
aaccgatgtcggctttggagactta

SEQ ID NO: 264130 - DNA, 25 bp, Probe sequence
aatggtaaaccaatatctgtagata

SEQ ID NO: 264131 - DNA, 25 bp, Probe sequence
caaaacggttcacatgcatcacttg

SEQ ID NO: 264132 - DNA, 25 bp, Probe sequence
cttacctctaaatgccataccgatt

SEQ ID NO: 264133 - DNA, 25 bp, Probe sequence
cgctttatgttaacggtgcctttcg

SEQ ID NO: 264134 - DNA, 25 bp, Probe sequence
gcgactcgctttatgttaacggtgc

SEQ ID NO: 264135 - DNA, 25 bp, Probe sequence
gaaccaactcgttataatcaaccga

SEQ ID NO: 264136 - DNA, 25 bp, Probe sequence
gaacgccagaaaagttagctatcac

SEQ ID NO: 264137 - DNA, 25 bp, Probe sequence
gacgtgctacaatgtttgaaaacca

SEQ ID NO: 264138 - DNA, 25 bp, Probe sequence
gagttaaacacatttttcaaagcat

SEQ ID NO: 264139 - DNA, 25 bp, Probe sequence
gattatctacaaattgaaccaactc

SEQ ID NO: 264140 - DNA, 25 bp, Probe sequence
gtagtcaaaacggttcacatgcatc

SEQ ID NO: 264141 - DNA, 25 bp, Probe sequence
gtcttttatgtaaccgatgtcggct

SEQ ID NO: 264142 - DNA, 25 bp, Probe sequence
ggagacttacctctaaatgccatac

SEQ ID NO: 264143 - DNA, 25 bp, Probe sequence
ggtgcctttcgaaaatattgatgtt

SEQ ID NO: 264144 - DNA, 25 bp, Probe sequence
ggataaggacattttctatgttcaa

SEQ ID NO: 264145 - DNA, 25 bp, Probe sequence
tatgttaacggtgcctttcgaaaat

SEQ ID NO: 264146 - DNA, 25 bp, Probe sequence
tgccataccgattactttaccagat

SEQ ID NO: 264147 - DNA, 25 bp, Probe sequence
tcgacttgaaaacagcgacaattaa

SEQ ID NO: 264148 - DNA, 25 bp, Probe sequence
taatgtcggctaccattcatacacc

SEQ ID NO: 264149 - DNA, 25 bp, Probe sequence
tacgaagctgaattcaaggctagag

SEQ ID NO: 264150 - DNA, 25 bp, Probe sequence
tacacagcagatcactgatatcagt

SEQ ID NO: 264151 - DNA, 25 bp, Probe sequence
tactttaccagatgatacacagcag

SEQ ID NO: 264152 - DNA, 25 bp, Probe sequence
taccattcatacacccggtggcggt

SEQ ID NO: 264153 - DNA, 25 bp, Probe sequence
attgtcaacgaagcattatgattcc

SEQ ID NO: 264154 - DNA, 25 bp, Probe sequence
attagaatgggtgctgacattagaa

SEQ ID NO: 264155 - DNA, 25 bp, Probe sequence
atcgtatctcaggatgatacacaaa

SEQ ID NO: 264156 - DNA, 25 bp, Probe sequence
atgggtgctgacattagaattaagt

SEQ ID NO: 264157 - DNA, 25 bp, Probe sequence
agaatgggtgctgacattagaatta

SEQ ID NO: 264158 - DNA, 25 bp, Probe sequence
actaaaaaaaatcatcgtatctcag

SEQ ID NO: 264159 - DNA, 25 bp, Probe sequence
acatgcgtgtggaaccaatcgtttt

SEQ ID NO: 264160 - DNA, 25 bp, Probe sequence
aaattgtcaacgaagcattatgatt

SEQ ID NO: 264161 - DNA, 25 bp, Probe sequence
aaatcatcgtatctcaggatgatac

SEQ ID NO: 264162 - DNA, 25 bp, Probe sequence
aaaaaaatcatcgtatctcaggatg

SEQ ID NO: 264163 - DNA, 25 bp, Probe sequence
aaaaaaaatcatcgtatctcaggat

SEQ ID NO: 264164 - DNA, 25 bp, Probe sequence
aaaaaatcatcgtatctcaggatga

SEQ ID NO: 264165 - DNA, 25 bp, Probe sequence
aactaaaaaaaatcatcgtatctca

SEQ ID NO: 264166 - DNA, 25 bp, Probe sequence
aattgtcaacgaagcattatgattc

SEQ ID NO: 264167 - DNA, 25 bp, Probe sequence
catgcgtgtggaaccaatcgtttta

SEQ ID NO: 264168 - DNA, 25 bp, Probe sequence
catcgtatctcaggatgatacacaa

SEQ ID NO: 264169 - DNA, 25 bp, Probe sequence
ctaaaaaaaatcatcgtatctcagg

SEQ ID NO: 264170 - DNA, 25 bp, Probe sequence
cgtatctcaggatgatacacaaaga

SEQ ID NO: 264171 - DNA, 25 bp, Probe sequence
gctgacattagaattaagtgtgaaa

SEQ ID NO: 264172 - DNA, 25 bp, Probe sequence
gaatgggtgctgacattagaattaa

SEQ ID NO: 264173 - DNA, 25 bp, Probe sequence
gaaaattgtcaacgaagcattatga

SEQ ID NO: 264174 - DNA, 25 bp, Probe sequence
gtcaacgaagcattatgattccacg

SEQ ID NO: 264175 - DNA, 25 bp, Probe sequence
gtgctgacattagaattaagtgtga

SEQ ID NO: 264176 - DNA, 25 bp, Probe sequence
gtgaaaattgtcaacgaagcattat

SEQ ID NO: 264177 - DNA, 25 bp, Probe sequence
gggtgctgacattagaattaagtgt

SEQ ID NO: 264178 - DNA, 25 bp, Probe sequence
ggtgctgacattagaattaagtgtg

SEQ ID NO: 264179 - DNA, 25 bp, Probe sequence
tgggtgctgacattagaattaagtg

SEQ ID NO: 264180 - DNA, 25 bp, Probe sequence
tgtcaacgaagcattatgattccac

SEQ ID NO: 264181 - DNA, 25 bp, Probe sequence
tcatcgtatctcaggatgatacaca

SEQ ID NO: 264182 - DNA, 25 bp, Probe sequence
tcaacgaagcattatgattccacgt

SEQ ID NO: 264183 - DNA, 25 bp, Probe sequence
taaaaaaaatcatcgtatctcagga

SEQ ID NO: 264184 - DNA, 25 bp, Probe sequence
tagaatgggtgctgacattagaatt

SEQ ID NO: 264185 - DNA, 25 bp, Probe sequence
tattagaatgggtgctgacattaga

SEQ ID NO: 264186 - DNA, 25 bp, Probe sequence
ttgtcaacgaagcattatgattcca

SEQ ID NO: 264187 - DNA, 25 bp, Probe sequence
attaactaacaatacaccatatagt

SEQ ID NO: 264188 - DNA, 25 bp, Probe sequence
atatgaatatcaaagaacattagaa

SEQ ID NO: 264189 - DNA, 25 bp, Probe sequence
atacaccatatagtatttcaaaaaa

SEQ ID NO: 264190 - DNA, 25 bp, Probe sequence
atgaatgagattgaaactattataa

SEQ ID NO: 264191 - DNA, 25 bp, Probe sequence
atgagattgaaactattataagtga

SEQ ID NO: 264192 - DNA, 25 bp, Probe sequence
agttattaactaacaatacaccata

SEQ ID NO: 264193 - DNA, 25 bp, Probe sequence
agctaaatttaaaacgataatcaag

SEQ ID NO: 264194 - DNA, 25 bp, Probe sequence
actaacaatacaccatatagtattt

SEQ ID NO: 264195 - DNA, 25 bp, Probe sequence
acaatacaccatatagtatttcaaa

SEQ ID NO: 264196 - DNA, 25 bp, Probe sequence
aaacgataatcaagttatatgaata

SEQ ID NO: 264197 - DNA, 25 bp, Probe sequence
aaaacgataatcaagttatatgaat

SEQ ID NO: 264198 - DNA, 25 bp, Probe sequence
aacaatacaccatatagtatttcaa

SEQ ID NO: 264199 - DNA, 25 bp, Probe sequence
aactaacaatacaccatatagtatt

SEQ ID NO: 264200 - DNA, 25 bp, Probe sequence
aacgataatcaagttatatgaatat

SEQ ID NO: 264201 - DNA, 25 bp, Probe sequence
aagttattaactaacaatacaccat

SEQ ID NO: 264202 - DNA, 25 bp, Probe sequence
aatgagattgaaactattataagtg

SEQ ID NO: 264203 - DNA, 25 bp, Probe sequence
aatacaccatatagtatttcaaaaa

SEQ ID NO: 264204 - DNA, 25 bp, Probe sequence
caatacaccatatagtatttcaaaa

SEQ ID NO: 264205 - DNA, 25 bp, Probe sequence
caggtgtaccacgtcaaacagttac

SEQ ID NO: 264206 - DNA, 25 bp, Probe sequence
ctaacaatacaccatatagtatttc

SEQ ID NO: 264207 - DNA, 25 bp, Probe sequence
gctaaatttaaaacgataatcaagt

SEQ ID NO: 264208 - DNA, 25 bp, Probe sequence
gaatgagattgaaactattataagt

SEQ ID NO: 264209 - DNA, 25 bp, Probe sequence
gaagctaaatttaaaacgataatca

SEQ ID NO: 264210 - DNA, 25 bp, Probe sequence
gagattgaaactattataagtgaaa

SEQ ID NO: 264211 - DNA, 25 bp, Probe sequence
gataatcaagttatatgaatatcaa

SEQ ID NO: 264212 - DNA, 25 bp, Probe sequence
gttattaactaacaatacaccatat

SEQ ID NO: 264213 - DNA, 25 bp, Probe sequence
tgagattgaaactattataagtgaa

SEQ ID NO: 264214 - DNA, 25 bp, Probe sequence
tgaatgagattgaaactattataag

SEQ ID NO: 264215 - DNA, 25 bp, Probe sequence
tcaggtgtaccacgtcaaacagtta

SEQ ID NO: 264216 - DNA, 25 bp, Probe sequence
taactaacaatacaccatatagtat

SEQ ID NO: 264217 - DNA, 25 bp, Probe sequence
taacaatacaccatatagtatttca

SEQ ID NO: 264218 - DNA, 25 bp, Probe sequence
tattaactaacaatacaccatatag

SEQ ID NO: 264219 - DNA, 25 bp, Probe sequence
ttattaactaacaatacaccatata

SEQ ID NO: 264220 - DNA, 25 bp, Probe sequence
ttaactaacaatacaccatatagta

SEQ ID NO: 264221 - DNA, 25 bp, Probe sequence
atcaaataaaatctggcaatataaa

SEQ ID NO: 264222 - DNA, 25 bp, Probe sequence
atctggcaatataaaaggtaactct

SEQ ID NO: 264223 - DNA, 25 bp, Probe sequence
atgagtcaaacggaatatcaaataa

SEQ ID NO: 264224 - DNA, 25 bp, Probe sequence
agtacagtatctaatataagttatg

SEQ ID NO: 264225 - DNA, 25 bp, Probe sequence
agaaacaagtacagtatctaatata

SEQ ID NO: 264226 - DNA, 25 bp, Probe sequence
acggaatatcaaataaaatctggca

SEQ ID NO: 264227 - DNA, 25 bp, Probe sequence
acagtatctaatataagttatgaaa

SEQ ID NO: 264228 - DNA, 25 bp, Probe sequence
acaagtacagtatctaatataagtt

SEQ ID NO: 264229 - DNA, 25 bp, Probe sequence
aaatctggcaatataaaaggtaact

SEQ ID NO: 264230 - DNA, 25 bp, Probe sequence
aaacaagtacagtatctaatataag

SEQ ID NO: 264231 - DNA, 25 bp, Probe sequence
aacaagtacagtatctaatataagt

SEQ ID NO: 264232 - DNA, 25 bp, Probe sequence
aacggaatatcaaataaaatctggc

SEQ ID NO: 264233 - DNA, 25 bp, Probe sequence
aagaaacaagtacagtatctaatat

SEQ ID NO: 264234 - DNA, 25 bp, Probe sequence
aagtacagtatctaatataagttat

SEQ ID NO: 264235 - DNA, 25 bp, Probe sequence
aatctggcaatataaaaggtaactc

SEQ ID NO: 264236 - DNA, 25 bp, Probe sequence
aatatcaaataaaatctggcaatat

SEQ ID NO: 264237 - DNA, 25 bp, Probe sequence
caagtacagtatctaatataagtta

SEQ ID NO: 264238 - DNA, 25 bp, Probe sequence
ctctgaagaaacaagtacagtatct

SEQ ID NO: 264239 - DNA, 25 bp, Probe sequence
ctgaagaaacaagtacagtatctaa

SEQ ID NO: 264240 - DNA, 25 bp, Probe sequence
ctggcaatataaaaggtaactctga

SEQ ID NO: 264241 - DNA, 25 bp, Probe sequence
cggaatatcaaataaaatctggcaa

SEQ ID NO: 264242 - DNA, 25 bp, Probe sequence
gaatatcaaataaaatctggcaata

SEQ ID NO: 264243 - DNA, 25 bp, Probe sequence
gaagaaacaagtacagtatctaata

SEQ ID NO: 264244 - DNA, 25 bp, Probe sequence
gaaacaagtacagtatctaatataa

SEQ ID NO: 264245 - DNA, 25 bp, Probe sequence
gagtcaaacggaatatcaaataaaa

SEQ ID NO: 264246 - DNA, 25 bp, Probe sequence
gtacagtatctaatataagttatga

SEQ ID NO: 264247 - DNA, 25 bp, Probe sequence
gtcaaacggaatatcaaataaaatc

SEQ ID NO: 264248 - DNA, 25 bp, Probe sequence
ggaatatcaaataaaatctggcaat

SEQ ID NO: 264249 - DNA, 25 bp, Probe sequence
tggcaatataaaaggtaactctgaa

SEQ ID NO: 264250 - DNA, 25 bp, Probe sequence
tgaagaaacaagtacagtatctaat

SEQ ID NO: 264251 - DNA, 25 bp, Probe sequence
tctggcaatataaaaggtaactctg

SEQ ID NO: 264252 - DNA, 25 bp, Probe sequence
tctgaagaaacaagtacagtatcta

SEQ ID NO: 264253 - DNA, 25 bp, Probe sequence
tacagtatctaatataagttatgaa

SEQ ID NO: 264254 - DNA, 25 bp, Probe sequence
tatcaaataaaatctggcaatataa

SEQ ID NO: 264255 - DNA, 25 bp, Probe sequence
attctgacaatataaagagtaactc

SEQ ID NO: 264256 - DNA, 25 bp, Probe sequence
atagatgcgagtgaaacgctaaagg

SEQ ID NO: 264257 - DNA, 25 bp, Probe sequence
atatagatgcgagtgaaacgctaaa

SEQ ID NO: 264258 - DNA, 25 bp, Probe sequence
ataacgatttaaataatgcaagtat

SEQ ID NO: 264259 - DNA, 25 bp, Probe sequence
ataatgcaagtattcaaacgcaaat

SEQ ID NO: 264260 - DNA, 25 bp, Probe sequence
atcaaataaattctgacaatataaa

SEQ ID NO: 264261 - DNA, 25 bp, Probe sequence
atgcgagtgaaacgctaaaggatat

SEQ ID NO: 264262 - DNA, 25 bp, Probe sequence
agatgcgagtgaaacgctaaaggat

SEQ ID NO: 264263 - DNA, 25 bp, Probe sequence
agaaacaagcgcaatatctagtata

SEQ ID NO: 264264 - DNA, 25 bp, Probe sequence
agcgcaatatctagtataagttatg

SEQ ID NO: 264265 - DNA, 25 bp, Probe sequence
acaagcgcaatatctagtataagtt

SEQ ID NO: 264266 - DNA, 25 bp, Probe sequence
aaatatcaaataaattctgacaata

SEQ ID NO: 264267 - DNA, 25 bp, Probe sequence
aaataatgcaagtattcaaacgcaa

SEQ ID NO: 264268 - DNA, 25 bp, Probe sequence
aaacaagcgcaatatctagtataag

SEQ ID NO: 264269 - DNA, 25 bp, Probe sequence
aacaagcgcaatatctagtataagt

SEQ ID NO: 264270 - DNA, 25 bp, Probe sequence
aagcgcaatatctagtataagttat

SEQ ID NO: 264271 - DNA, 25 bp, Probe sequence
aagaaacaagcgcaatatctagtat

SEQ ID NO: 264272 - DNA, 25 bp, Probe sequence
aataatgcaagtattcaaacgcaaa

SEQ ID NO: 264273 - DNA, 25 bp, Probe sequence
aataacgatttaaataatgcaagta

SEQ ID NO: 264274 - DNA, 25 bp, Probe sequence
aatatcaaataaattctgacaatat

SEQ ID NO: 264275 - DNA, 25 bp, Probe sequence
caagcgcaatatctagtataagtta

SEQ ID NO: 264276 - DNA, 25 bp, Probe sequence
ctgacaatataaagagtaactctga

SEQ ID NO: 264277 - DNA, 25 bp, Probe sequence
cgcaatatctagtataagttatgaa

SEQ ID NO: 264278 - DNA, 25 bp, Probe sequence
gcgagtgaaacgctaaaggatattg

SEQ ID NO: 264279 - DNA, 25 bp, Probe sequence
gcaatatctagtataagttatgaaa

SEQ ID NO: 264280 - DNA, 25 bp, Probe sequence
gaaacaagcgcaatatctagtataa

SEQ ID NO: 264281 - DNA, 25 bp, Probe sequence
gatgcgagtgaaacgctaaaggata

SEQ ID NO: 264282 - DNA, 25 bp, Probe sequence
ggatatatagatgcgagtgaaacgc

SEQ ID NO: 264283 - DNA, 25 bp, Probe sequence
tgcgagtgaaacgctaaaggatatt

SEQ ID NO: 264284 - DNA, 25 bp, Probe sequence
tcaaggatatatagatgcgagtgaa

SEQ ID NO: 264285 - DNA, 25 bp, Probe sequence
tagatgcgagtgaaacgctaaagga

SEQ ID NO: 264286 - DNA, 25 bp, Probe sequence
tatagatgcgagtgaaacgctaaag

SEQ ID NO: 264287 - DNA, 25 bp, Probe sequence
tatcaaataaattctgacaatataa

SEQ ID NO: 264288 - DNA, 25 bp, Probe sequence
ttctgacaatataaagagtaactct

SEQ ID NO: 264289 - DNA, 25 bp, Probe sequence
atgaccaaatgttagcgagccagat

SEQ ID NO: 264290 - DNA, 25 bp, Probe sequence
atgttagcgagccagattgatggga

SEQ ID NO: 264291 - DNA, 25 bp, Probe sequence
atggctatatcgcaaaaattaaaca

SEQ ID NO: 264292 - DNA, 25 bp, Probe sequence
acagagtatcgaagcaattgtttct

SEQ ID NO: 264293 - DNA, 25 bp, Probe sequence
aaattgtaatggctatatcgcaaaa

SEQ ID NO: 264294 - DNA, 25 bp, Probe sequence
aaatgttagcgagccagattgatgg

SEQ ID NO: 264295 - DNA, 25 bp, Probe sequence
aagaaaaggtggcgcgtatgaaagt

SEQ ID NO: 264296 - DNA, 25 bp, Probe sequence
aaggtggcgcgtatgaaagtaaact

SEQ ID NO: 264297 - DNA, 25 bp, Probe sequence
aatgaccaaatgttagcgagccaga

SEQ ID NO: 264298 - DNA, 25 bp, Probe sequence
aattgtttctaatgaccaaatgtta

SEQ ID NO: 264299 - DNA, 25 bp, Probe sequence
aattaagaaaaggtggcgcgtatga

SEQ ID NO: 264300 - DNA, 25 bp, Probe sequence
cctctgaagaggttatagatgaatt

SEQ ID NO: 264301 - DNA, 25 bp, Probe sequence
ccaaatgttagcgagccagattgat

SEQ ID NO: 264302 - DNA, 25 bp, Probe sequence
gcgagccagattgatgggatgatgt

SEQ ID NO: 264303 - DNA, 25 bp, Probe sequence
gcaattgtttctaatgaccaaatgt

SEQ ID NO: 264304 - DNA, 25 bp, Probe sequence
gaagcaattgtttctaatgaccaaa

SEQ ID NO: 264305 - DNA, 25 bp, Probe sequence
gaaaaggtggcgcgtatgaaagtaa

SEQ ID NO: 264306 - DNA, 25 bp, Probe sequence
gaaacagatcccaaaagaaaaattg

SEQ ID NO: 264307 - DNA, 25 bp, Probe sequence
gaaagtaaacttgaaacagatccca

SEQ ID NO: 264308 - DNA, 25 bp, Probe sequence
gaaattggtgaaaaattaacctctg

SEQ ID NO: 264309 - DNA, 25 bp, Probe sequence
gaccaaatgttagcgagccagattg

SEQ ID NO: 264310 - DNA, 25 bp, Probe sequence
gagccagattgatgggatgatgtaa

SEQ ID NO: 264311 - DNA, 25 bp, Probe sequence
gagtatcgaagcaattgtttctaat

SEQ ID NO: 264312 - DNA, 25 bp, Probe sequence
gttagcgagccagattgatgggatg

SEQ ID NO: 264313 - DNA, 25 bp, Probe sequence
gtatcgaagcaattgtttctaatga

SEQ ID NO: 264314 - DNA, 25 bp, Probe sequence
gtaaacttgaaacagatcccaaaag

SEQ ID NO: 264315 - DNA, 25 bp, Probe sequence
gtggcgcgtatgaaagtaaacttga

SEQ ID NO: 264316 - DNA, 25 bp, Probe sequence
ggtggcgcgtatgaaagtaaacttg

SEQ ID NO: 264317 - DNA, 25 bp, Probe sequence
ggtgaaaaattaacctctgaagagg

SEQ ID NO: 264318 - DNA, 25 bp, Probe sequence
ggctatatcgcaaaaattaaacaga

SEQ ID NO: 264319 - DNA, 25 bp, Probe sequence
tcgaagcaattgtttctaatgacca

SEQ ID NO: 264320 - DNA, 25 bp, Probe sequence
taaaaattgtaatggctatatcgca

SEQ ID NO: 264321 - DNA, 25 bp, Probe sequence
tagcgagccagattgatgggatgat

SEQ ID NO: 264322 - DNA, 25 bp, Probe sequence
ttgtaatggctatatcgcaaaaatt

SEQ ID NO: 264323 - DNA, 25 bp, Probe sequence
ataaaggcaccggtactatgattgg

SEQ ID NO: 264324 - DNA, 25 bp, Probe sequence
ataaccgtgtatataaaggcaccgg

SEQ ID NO: 264325 - DNA, 25 bp, Probe sequence
ataataatcctatcgtcaattcaga

SEQ ID NO: 264326 - DNA, 25 bp, Probe sequence
atcatttttgattttgttagtagta

SEQ ID NO: 264327 - DNA, 25 bp, Probe sequence
atcctatcgtcaattcagaaaatgg

SEQ ID NO: 264328 - DNA, 25 bp, Probe sequence
atggtgaaagttttgtcttagctga

SEQ ID NO: 264329 - DNA, 25 bp, Probe sequence
aggtgattatagtacgcccttaact

SEQ ID NO: 264330 - DNA, 25 bp, Probe sequence
agtacgcccttaactgagcgagttt

SEQ ID NO: 264331 - DNA, 25 bp, Probe sequence
agattgatgtctatgctggagtaaa

SEQ ID NO: 264332 - DNA, 25 bp, Probe sequence
gcccttaactgagcgagttttcggt

SEQ ID NO: 264333 - DNA, 25 bp, Probe sequence
acagcggctcataatgtctattcta

SEQ ID NO: 264334 - DNA, 25 bp, Probe sequence
acaataggaaaggccttttcgcata

SEQ ID NO: 264335 - DNA, 25 bp, Probe sequence
aaggacattgtattgacagcggctc

SEQ ID NO: 264336 - DNA, 25 bp, Probe sequence
aattgtttctagttattatggtgaa

SEQ ID NO: 264337 - DNA, 25 bp, Probe sequence
gccttttcgcataagttttttgtat

SEQ ID NO: 264338 - DNA, 25 bp, Probe sequence
gcgagttttcggtaaagatcaaaga

SEQ ID NO: 264339 - DNA, 25 bp, Probe sequence
gcggctcataatgtctattctaaag

SEQ ID NO: 264340 - DNA, 25 bp, Probe sequence
gaatcaggaacaattgaacgtaatc

SEQ ID NO: 264341 - DNA, 25 bp, Probe sequence
gaacgtaatcaaaatgagctttatg

SEQ ID NO: 264342 - DNA, 25 bp, Probe sequence
gacattgtattgacagcggctcata

SEQ ID NO: 264343 - DNA, 25 bp, Probe sequence
gaccttataagcagactgtattatt

SEQ ID NO: 264344 - DNA, 25 bp, Probe sequence
gagctttatgaagtaggtgattata

SEQ ID NO: 264345 - DNA, 25 bp, Probe sequence
gagtaaatgggcaaacatatacaat

SEQ ID NO: 264346 - DNA, 25 bp, Probe sequence
gatgtctatgctggagtaaatgggc

SEQ ID NO: 264347 - DNA, 25 bp, Probe sequence
gattatagtacgcccttaactgagc

SEQ ID NO: 264348 - DNA, 25 bp, Probe sequence
gttagtagtaattgtttctagttat

SEQ ID NO: 264349 - DNA, 25 bp, Probe sequence
gttttgtcttagctgataataatcc

SEQ ID NO: 264350 - DNA, 25 bp, Probe sequence
gggttgggctaaaaagattgatgtc

SEQ ID NO: 264351 - DNA, 25 bp, Probe sequence
ggcaccggtactatgattggtaagg

SEQ ID NO: 264352 - DNA, 25 bp, Probe sequence
taggaaaggccttttcgcataagtt

SEQ ID NO: 264353 - DNA, 25 bp, Probe sequence
tctaaagacgataagggttgggcta

SEQ ID NO: 264354 - DNA, 25 bp, Probe sequence
tacaaagaccttataagcagactgt

SEQ ID NO: 264355 - DNA, 25 bp, Probe sequence
tatgacgttttcaaataaccgtgta

SEQ ID NO: 264356 - DNA, 25 bp, Probe sequence
ttcgcataagttttttgtatctaaa

SEQ ID NO: 264357 - DNA, 25 bp, Probe sequence
attatacggtagacacattttcagg

SEQ ID NO: 264358 - DNA, 25 bp, Probe sequence
atcggagtacatgcatacggcagat

SEQ ID NO: 264359 - DNA, 25 bp, Probe sequence
aggtaagtatagaagtcatccatat

SEQ ID NO: 264360 - DNA, 25 bp, Probe sequence
agatggatgggttactttaatagca

SEQ ID NO: 264361 - DNA, 25 bp, Probe sequence
acatgcatacggcagatataatcat

SEQ ID NO: 264362 - DNA, 25 bp, Probe sequence
aaagcgtacacagctaaactctatt

SEQ ID NO: 264363 - DNA, 25 bp, Probe sequence
aaaacaatatcatcggagtacatgc

SEQ ID NO: 264364 - DNA, 25 bp, Probe sequence
caaatgggtataaatattactcttt

SEQ ID NO: 264365 - DNA, 25 bp, Probe sequence
caggttacttaactttgaacacaca

SEQ ID NO: 264366 - DNA, 25 bp, Probe sequence
ctctattacaatattccaaatgggt

SEQ ID NO: 264367 - DNA, 25 bp, Probe sequence
gcgtacacagctaaactctattaca

SEQ ID NO: 264368 - DNA, 25 bp, Probe sequence
gctaaactctattacaatattccaa

SEQ ID NO: 264369 - DNA, 25 bp, Probe sequence
gaagtcatccatataataagaaagt

SEQ ID NO: 264370 - DNA, 25 bp, Probe sequence
gaacacacacattagcaaaggtgaa

SEQ ID NO: 264371 - DNA, 25 bp, Probe sequence
gacacattttcaggacaaagtggta

SEQ ID NO: 264372 - DNA, 25 bp, Probe sequence
gatgggttactttaatagcaatgat

SEQ ID NO: 264373 - DNA, 25 bp, Probe sequence
gataaagcgtacacagctaaactct

SEQ ID NO: 264374 - DNA, 25 bp, Probe sequence
gtggtagtgcgataagagattcaaa

SEQ ID NO: 264375 - DNA, 25 bp, Probe sequence
ggtagacacattttcaggacaaagt

SEQ ID NO: 264376 - DNA, 25 bp, Probe sequence
ggatttccaggagacaagtcagaca

SEQ ID NO: 264377 - DNA, 25 bp, Probe sequence
ggagtacatgcatacggcagatata

SEQ ID NO: 264378 - DNA, 25 bp, Probe sequence
ggagacaagtcagacaacagacaat

SEQ ID NO: 264379 - DNA, 25 bp, Probe sequence
ggcagatataatcataattcaggcg

SEQ ID NO: 264380 - DNA, 25 bp, Probe sequence
tctggatttccaggagacaagtcag

SEQ ID NO: 264381 - DNA, 25 bp, Probe sequence
tcatcggagtacatgcatacggcag

SEQ ID NO: 264382 - DNA, 25 bp, Probe sequence
taaatattactctttatacgacgaa

SEQ ID NO: 264383 - DNA, 25 bp, Probe sequence
tacggtagacacattttcaggacaa

SEQ ID NO: 264384 - DNA, 25 bp, Probe sequence
tacacagctaaactctattacaata

SEQ ID NO: 264385 - DNA, 25 bp, Probe sequence
tatcatcggagtacatgcatacggc

SEQ ID NO: 264386 - DNA, 25 bp, Probe sequence
tataatcataattcaggcgtgagaa

SEQ ID NO: 264387 - DNA, 25 bp, Probe sequence
tattgaaatttctggatttccagga

SEQ ID NO: 264388 - DNA, 25 bp, Probe sequence
ttacttaactttgaacacacacatt

SEQ ID NO: 264389 - DNA, 25 bp, Probe sequence
ttcaggacaaagtggtagtgcgata

SEQ ID NO: 264390 - DNA, 25 bp, Probe sequence
ttaactttgaacacacacattagca

SEQ ID NO: 264391 - DNA, 25 bp, Probe sequence
attttgccaaatgatgtgcgtaaac

SEQ ID NO: 264392 - DNA, 25 bp, Probe sequence
atacgcgcttaaacgatgtcacatt

SEQ ID NO: 264393 - DNA, 25 bp, Probe sequence
atcacatcattgaacaagtgttttc

SEQ ID NO: 264394 - DNA, 25 bp, Probe sequence
atctaatggtaatcctgtcacaatt

SEQ ID NO: 264395 - DNA, 25 bp, Probe sequence
atgacgattttgaagattttggtac

SEQ ID NO: 264396 - DNA, 25 bp, Probe sequence
acctcttcgtattatacttggttct

SEQ ID NO: 264397 - DNA, 25 bp, Probe sequence
acttggttctgtaaacttgtatggt

SEQ ID NO: 264398 - DNA, 25 bp, Probe sequence
aaatttcgtgaatcaagtcggcaat

SEQ ID NO: 264399 - DNA, 25 bp, Probe sequence
aaatcatctaggttttgtttatcaa

SEQ ID NO: 264400 - DNA, 25 bp, Probe sequence
aaagctaacaaatcatctaggtttt

SEQ ID NO: 264401 - DNA, 25 bp, Probe sequence
aaacttgtatggtattttatcaact

SEQ ID NO: 264402 - DNA, 25 bp, Probe sequence
aacgcgttagaattatcatttatgg

SEQ ID NO: 264403 - DNA, 25 bp, Probe sequence
aatatgcaggcagtatggtatcaaa

SEQ ID NO: 264404 - DNA, 25 bp, Probe sequence
aattgagaatagtttagcagagttt

SEQ ID NO: 264405 - DNA, 25 bp, Probe sequence
caagtcggcaatggtgattttgaga

SEQ ID NO: 264406 - DNA, 25 bp, Probe sequence
gctttacgccctgaaaatatacata

SEQ ID NO: 264407 - DNA, 25 bp, Probe sequence
gcatttttcaataataatcacatca

SEQ ID NO: 264408 - DNA, 25 bp, Probe sequence
gcatgcgaatattttaatttaccga

SEQ ID NO: 264409 - DNA, 25 bp, Probe sequence
gaattaattatgacagcatttttca

SEQ ID NO: 264410 - DNA, 25 bp, Probe sequence
gaatatgattgtcttattttgccaa

SEQ ID NO: 264411 - DNA, 25 bp, Probe sequence
gaaacacttatatctaatggtaatc

SEQ ID NO: 264412 - DNA, 25 bp, Probe sequence
gatattttacctcttcgtattatac

SEQ ID NO: 264413 - DNA, 25 bp, Probe sequence
gttgacttagatatgttacttgaac

SEQ ID NO: 264414 - DNA, 25 bp, Probe sequence
gttacttgaacatgacgattttgaa

SEQ ID NO: 264415 - DNA, 25 bp, Probe sequence
gtatggtatcaaaggattctcaaat

SEQ ID NO: 264416 - DNA, 25 bp, Probe sequence
gtcacattagaacatgctttactgt

SEQ ID NO: 264417 - DNA, 25 bp, Probe sequence
gtgatgcaatcactcaattgatttc

SEQ ID NO: 264418 - DNA, 25 bp, Probe sequence
ggtgtgcaaaaatgcttgatgttca

SEQ ID NO: 264419 - DNA, 25 bp, Probe sequence
ggtgaattcgaatcgttagatacaa

SEQ ID NO: 264420 - DNA, 25 bp, Probe sequence
ggtaatcctgtcacaattataaata

SEQ ID NO: 264421 - DNA, 25 bp, Probe sequence
taactaccgattaaacaatgaacta

SEQ ID NO: 264422 - DNA, 25 bp, Probe sequence
tacgtgtaagacaacatacgcgctt

SEQ ID NO: 264423 - DNA, 25 bp, Probe sequence
tattttatcaactaatcatctacta

SEQ ID NO: 264424 - DNA, 25 bp, Probe sequence
tttggtacaaccgatagcttaagaa

SEQ ID NO: 264425 - DNA, 25 bp, Probe sequence
atacaacgagatgtgcgataatgct

SEQ ID NO: 264426 - DNA, 25 bp, Probe sequence
ataatgcttaaagtatgtacctctc

SEQ ID NO: 264427 - DNA, 25 bp, Probe sequence
atccttaacaacgtccaaaatgatg

SEQ ID NO: 264428 - DNA, 25 bp, Probe sequence
atgcttaaagtatgtacctctcgca

SEQ ID NO: 264429 - DNA, 25 bp, Probe sequence
atgtgcgataatgcttaaagtatgt

SEQ ID NO: 264430 - DNA, 25 bp, Probe sequence
agatgtgcgataatgcttaaagtat

SEQ ID NO: 264431 - DNA, 25 bp, Probe sequence
acgagatgtgcgataatgcttaaag

SEQ ID NO: 264432 - DNA, 25 bp, Probe sequence
acgtccaaaatgatgcattattgat

SEQ ID NO: 264433 - DNA, 25 bp, Probe sequence
acaacgagatgtgcgataatgctta

SEQ ID NO: 264434 - DNA, 25 bp, Probe sequence
acaacgtccaaaatgatgcattatt

SEQ ID NO: 264435 - DNA, 25 bp, Probe sequence
aacaacgtccaaaatgatgcattat

SEQ ID NO: 264436 - DNA, 25 bp, Probe sequence
aacgagatgtgcgataatgcttaaa

SEQ ID NO: 264437 - DNA, 25 bp, Probe sequence
aatgcttaaagtatgtacctctcgc

SEQ ID NO: 264438 - DNA, 25 bp, Probe sequence
aatatatacaacgagatgtgcgata

SEQ ID NO: 264439 - DNA, 25 bp, Probe sequence
caacgtccaaaatgatgcattattg

SEQ ID NO: 264440 - DNA, 25 bp, Probe sequence
caacgagatgtgcgataatgcttaa

SEQ ID NO: 264441 - DNA, 25 bp, Probe sequence
cttaacaacgtccaaaatgatgcat

SEQ ID NO: 264442 - DNA, 25 bp, Probe sequence
cgagatgtgcgataatgcttaaagt

SEQ ID NO: 264443 - DNA, 25 bp, Probe sequence
ccttaacaacgtccaaaatgatgca

SEQ ID NO: 264444 - DNA, 25 bp, Probe sequence
gcgataatgcttaaagtatgtacct

SEQ ID NO: 264445 - DNA, 25 bp, Probe sequence
gagatgtgcgataatgcttaaagta

SEQ ID NO: 264446 - DNA, 25 bp, Probe sequence
gatgtgcgataatgcttaaagtatg

SEQ ID NO: 264447 - DNA, 25 bp, Probe sequence
gataatgcttaaagtatgtacctct

SEQ ID NO: 264448 - DNA, 25 bp, Probe sequence
gtccaaaatgatgcattattgatag

SEQ ID NO: 264449 - DNA, 25 bp, Probe sequence
gtgcgataatgcttaaagtatgtac

SEQ ID NO: 264450 - DNA, 25 bp, Probe sequence
tgcttaaagtatgtacctctcgcaa

SEQ ID NO: 264451 - DNA, 25 bp, Probe sequence
tccttaacaacgtccaaaatgatgc

SEQ ID NO: 264452 - DNA, 25 bp, Probe sequence
taatgcttaaagtatgtacctctcg

SEQ ID NO: 264453 - DNA, 25 bp, Probe sequence
taacaacgtccaaaatgatgcatta

SEQ ID NO: 264454 - DNA, 25 bp, Probe sequence
tacaacgagatgtgcgataatgctt

SEQ ID NO: 264455 - DNA, 25 bp, Probe sequence
tatccttaacaacgtccaaaatgat

SEQ ID NO: 264456 - DNA, 25 bp, Probe sequence
tatacaacgagatgtgcgataatgc

SEQ ID NO: 264457 - DNA, 25 bp, Probe sequence
tatatacaacgagatgtgcgataat

SEQ ID NO: 264458 - DNA, 25 bp, Probe sequence
ttaacaacgtccaaaatgatgcatt

SEQ ID NO: 264459 - DNA, 25 bp, Probe sequence
attgcaaggtcatcgtgacattcca

SEQ ID NO: 264460 - DNA, 25 bp, Probe sequence
atcatttacgtctatggtcattgca

SEQ ID NO: 264461 - DNA, 25 bp, Probe sequence
atctacgcaaacaaatcaatatgaa

SEQ ID NO: 264462 - DNA, 25 bp, Probe sequence
atgctatccttaacaacgttcaaaa

SEQ ID NO: 264463 - DNA, 25 bp, Probe sequence
atgcagttatttatagataatgcta

SEQ ID NO: 264464 - DNA, 25 bp, Probe sequence
aggtcatcgtgacattccaaactaa

SEQ ID NO: 264465 - DNA, 25 bp, Probe sequence
agcaactcatgcacgtaatcattta

SEQ ID NO: 264466 - DNA, 25 bp, Probe sequence
accagttatctacgcaaacaaatca

SEQ ID NO: 264467 - DNA, 25 bp, Probe sequence
acgttcaaaacgacgcattattgat

SEQ ID NO: 264468 - DNA, 25 bp, Probe sequence
acgtctatggtcattgcaaggtcat

SEQ ID NO: 264469 - DNA, 25 bp, Probe sequence
aaagcaactcatgcacgtaatcatt

SEQ ID NO: 264470 - DNA, 25 bp, Probe sequence
aacaacgttcaaaacgacgcattat

SEQ ID NO: 264471 - DNA, 25 bp, Probe sequence
aaccaattatgcagttatttataga

SEQ ID NO: 264472 - DNA, 25 bp, Probe sequence
aatcatttacgtctatggtcattgc

SEQ ID NO: 264473 - DNA, 25 bp, Probe sequence
cagttatctacgcaaacaaatcaat

SEQ ID NO: 264474 - DNA, 25 bp, Probe sequence
catttacgtctatggtcattgcaag

SEQ ID NO: 264475 - DNA, 25 bp, Probe sequence
ctatggtcattgcaaggtcatcgtg

SEQ ID NO: 264476 - DNA, 25 bp, Probe sequence
gctatccttaacaacgttcaaaacg

SEQ ID NO: 264477 - DNA, 25 bp, Probe sequence
gcaaggtcatcgtgacattccaaac

SEQ ID NO: 264478 - DNA, 25 bp, Probe sequence
gcaactcatgcacgtaatcatttac

SEQ ID NO: 264479 - DNA, 25 bp, Probe sequence
gaaaaagcaactcatgcacgtaatc

SEQ ID NO: 264480 - DNA, 25 bp, Probe sequence
gaaatctgatcaagcaattaaagag

SEQ ID NO: 264481 - DNA, 25 bp, Probe sequence
gataatgctatccttaacaacgttc

SEQ ID NO: 264482 - DNA, 25 bp, Probe sequence
gtaatcatttacgtctatggtcatt

SEQ ID NO: 264483 - DNA, 25 bp, Probe sequence
gtcattgcaaggtcatcgtgacatt

SEQ ID NO: 264484 - DNA, 25 bp, Probe sequence
gtctatggtcattgcaaggtcatcg

SEQ ID NO: 264485 - DNA, 25 bp, Probe sequence
tggtcattgcaaggtcatcgtgaca

SEQ ID NO: 264486 - DNA, 25 bp, Probe sequence
tcatgcacgtaatcatttacgtcta

SEQ ID NO: 264487 - DNA, 25 bp, Probe sequence
taatgctatccttaacaacgttcaa

SEQ ID NO: 264488 - DNA, 25 bp, Probe sequence
tacaaccaattatgcagttatttat

SEQ ID NO: 264489 - DNA, 25 bp, Probe sequence
tatggtcattgcaaggtcatcgtga

SEQ ID NO: 264490 - DNA, 25 bp, Probe sequence
tatttgaaatctgatcaagcaatta

SEQ ID NO: 264491 - DNA, 25 bp, Probe sequence
ttacgtctatggtcattgcaaggtc

SEQ ID NO: 264492 - DNA, 25 bp, Probe sequence
ttgcaaggtcatcgtgacattccaa

SEQ ID NO: 264493 - DNA, 25 bp, Probe sequence
attgcaaggtcatcgtgacattcca

SEQ ID NO: 264494 - DNA, 25 bp, Probe sequence
atcatttgcgtctatggtcattgca

SEQ ID NO: 264495 - DNA, 25 bp, Probe sequence
atgtacctctcgcaaacaaatcaat

SEQ ID NO: 264496 - DNA, 25 bp, Probe sequence
aggtcatcgtgacattccaaactaa

SEQ ID NO: 264497 - DNA, 25 bp, Probe sequence
agcaactcatgcacgtaatcatttg

SEQ ID NO: 264498 - DNA, 25 bp, Probe sequence
acctacatctaaattgatacaacca

SEQ ID NO: 264499 - DNA, 25 bp, Probe sequence
acctctcgcaaacaaatcaatatga

SEQ ID NO: 264500 - DNA, 25 bp, Probe sequence
acgatacctacatctaaattgatac

SEQ ID NO: 264501 - DNA, 25 bp, Probe sequence
actcatgcacgtaatcatttgcgtc

SEQ ID NO: 264502 - DNA, 25 bp, Probe sequence
aaaacgacgcattattgatagaaaa

SEQ ID NO: 264503 - DNA, 25 bp, Probe sequence
aacattgttcaaaacgacgcattat

SEQ ID NO: 264504 - DNA, 25 bp, Probe sequence
aatgctatccttaacattgttcaaa

SEQ ID NO: 264505 - DNA, 25 bp, Probe sequence
caaccaattatgcagttatttatag

SEQ ID NO: 264506 - DNA, 25 bp, Probe sequence
catgcacgtaatcatttgcgtctat

SEQ ID NO: 264507 - DNA, 25 bp, Probe sequence
cattatgcttttacgtacgatacct

SEQ ID NO: 264508 - DNA, 25 bp, Probe sequence
gcgtctatggtcattgcaaggtcat

SEQ ID NO: 264509 - DNA, 25 bp, Probe sequence
gctatccttaacattgttcaaaacg

SEQ ID NO: 264510 - DNA, 25 bp, Probe sequence
gcttttacgtacgatacctacatct

SEQ ID NO: 264511 - DNA, 25 bp, Probe sequence
gcacgtaatcatttgcgtctatggt

SEQ ID NO: 264512 - DNA, 25 bp, Probe sequence
gcaaggtcatcgtgacattccaaac

SEQ ID NO: 264513 - DNA, 25 bp, Probe sequence
gaaggaaaagtatgtgaacgaaatc

SEQ ID NO: 264514 - DNA, 25 bp, Probe sequence
gaacgaaatcattatgcttttacgt

SEQ ID NO: 264515 - DNA, 25 bp, Probe sequence
gaaaaagcaactcatgcacgtaatc

SEQ ID NO: 264516 - DNA, 25 bp, Probe sequence
gaaatcattatgcttttacgtacga

SEQ ID NO: 264517 - DNA, 25 bp, Probe sequence
gataatgctatccttaacattgttc

SEQ ID NO: 264518 - DNA, 25 bp, Probe sequence
gatacaaccaattatgcagttattt

SEQ ID NO: 264519 - DNA, 25 bp, Probe sequence
gatacctacatctaaattgatacaa

SEQ ID NO: 264520 - DNA, 25 bp, Probe sequence
gtacctctcgcaaacaaatcaatat

SEQ ID NO: 264521 - DNA, 25 bp, Probe sequence
gtaatcatttgcgtctatggtcatt

SEQ ID NO: 264522 - DNA, 25 bp, Probe sequence
gtctatggtcattgcaaggtcatcg

SEQ ID NO: 264523 - DNA, 25 bp, Probe sequence
ggtcattgcaaggtcatcgtgacat

SEQ ID NO: 264524 - DNA, 25 bp, Probe sequence
tatggtcattgcaaggtcatcgtga

SEQ ID NO: 264525 - DNA, 25 bp, Probe sequence
tatgcttttacgtacgatacctaca

SEQ ID NO: 264526 - DNA, 25 bp, Probe sequence
ttacgtacgatacctacatctaaat

SEQ ID NO: 264527 - DNA, 25 bp, Probe sequence
attacaatgaagcgggtgctgatga

SEQ ID NO: 264528 - DNA, 25 bp, Probe sequence
atagctattatgatcctgaaagaaa

SEQ ID NO: 264529 - DNA, 25 bp, Probe sequence
ataaattcggtagacaatgcatctg

SEQ ID NO: 264530 - DNA, 25 bp, Probe sequence
agatgtcaaagatggtcgtgtcgtt

SEQ ID NO: 264531 - DNA, 25 bp, Probe sequence
agacagcgtcacgcttgtttatccc

SEQ ID NO: 264532 - DNA, 25 bp, Probe sequence
agcttaatgctagaagtgattgaac

SEQ ID NO: 264533 - DNA, 25 bp, Probe sequence
cttgtttatccctcttactgtaggg

SEQ ID NO: 264534 - DNA, 25 bp, Probe sequence
aaaaacgtatcattccatgtttaga

SEQ ID NO: 264535 - DNA, 25 bp, Probe sequence
aacaagcgagtgataaattcggtag

SEQ ID NO: 264536 - DNA, 25 bp, Probe sequence
aagaaaagcacattattgttgtacg

SEQ ID NO: 264537 - DNA, 25 bp, Probe sequence
aagtatcattaaattcaagtgcttt

SEQ ID NO: 264538 - DNA, 25 bp, Probe sequence
aatcattgcttctggtggtggtggc

SEQ ID NO: 264539 - DNA, 25 bp, Probe sequence
aatcatggtgcagataaagtatcat

SEQ ID NO: 264540 - DNA, 25 bp, Probe sequence
caagtgctttaaaaaatccacagct

SEQ ID NO: 264541 - DNA, 25 bp, Probe sequence
gcttctggtggtggtggcaatgcac

SEQ ID NO: 264542 - DNA, 25 bp, Probe sequence
gcaattgatagctattatgatcctg

SEQ ID NO: 264543 - DNA, 25 bp, Probe sequence
gaacagttaggtgcaggtgagctcc

SEQ ID NO: 264544 - DNA, 25 bp, Probe sequence
gacatctctaagacggaagagggtc

SEQ ID NO: 264545 - DNA, 25 bp, Probe sequence
gacggatgtttctgcaggtttagct

SEQ ID NO: 264546 - DNA, 25 bp, Probe sequence
gattgaacagacagcgtcacgcttg

SEQ ID NO: 264547 - DNA, 25 bp, Probe sequence
gtatttttagacatctctaagacgg

SEQ ID NO: 264548 - DNA, 25 bp, Probe sequence
gtatatgactgggtacagcaagtag

SEQ ID NO: 264549 - DNA, 25 bp, Probe sequence
gtatcattccatgtttagatgtcaa

SEQ ID NO: 264550 - DNA, 25 bp, Probe sequence
gtgagctcctcgttacaagtatggg

SEQ ID NO: 264551 - DNA, 25 bp, Probe sequence
ggtcgtgtcgttaaagggattcaat

SEQ ID NO: 264552 - DNA, 25 bp, Probe sequence
gtggtggtggcaatgcacaacactt

SEQ ID NO: 264553 - DNA, 25 bp, Probe sequence
gtggcaatgcacaacactttgtaga

SEQ ID NO: 264554 - DNA, 25 bp, Probe sequence
gggtacagcaagtagaacagttagg

SEQ ID NO: 264555 - DNA, 25 bp, Probe sequence
ggtttagctgcaagtatattacatg

SEQ ID NO: 264556 - DNA, 25 bp, Probe sequence
ttactgtagggggtgggattcaaag

SEQ ID NO: 264557 - DNA, 25 bp, Probe sequence
tatccctcttactgtagggggtggg

SEQ ID NO: 264558 - DNA, 25 bp, Probe sequence
ggaagagggtcatagcttaatgcta

SEQ ID NO: 264559 - DNA, 25 bp, Probe sequence
ttaggtgcaggtgagctcctcgtta

SEQ ID NO: 264560 - DNA, 25 bp, Probe sequence
ttccaatcattgcttctggtggtgg

SEQ ID NO: 264561 - DNA, 25 bp, Probe sequence
atttatttgtcttgatgcatgcgct

SEQ ID NO: 264562 - DNA, 25 bp, Probe sequence
agttgtttcaacacagaagttccat

SEQ ID NO: 264563 - DNA, 25 bp, Probe sequence
agcaaaggtttagtgccagcaattt

SEQ ID NO: 264564 - DNA, 25 bp, Probe sequence
accaacatgtcatacaggcagtcaa

SEQ ID NO: 264565 - DNA, 25 bp, Probe sequence
actattttaattgatgtcataccaa

SEQ ID NO: 264566 - DNA, 25 bp, Probe sequence
acattagcgcagacagttcaagata

SEQ ID NO: 264567 - DNA, 25 bp, Probe sequence
acatgtcatacaggcagtcaaagtt

SEQ ID NO: 264568 - DNA, 25 bp, Probe sequence
aaaggtgaaacatctggtcatacgc

SEQ ID NO: 264569 - DNA, 25 bp, Probe sequence
aaagcatttgtaagtgaagtagcag

SEQ ID NO: 264570 - DNA, 25 bp, Probe sequence
aatggaccaacatgtcatacaggca

SEQ ID NO: 264571 - DNA, 25 bp, Probe sequence
caaacattagcgcagacagttcaag

SEQ ID NO: 264572 - DNA, 25 bp, Probe sequence
caggcagtcaaagttgtttcaacac

SEQ ID NO: 264573 - DNA, 25 bp, Probe sequence
cgtagacatcataagcgcaataact

SEQ ID NO: 264574 - DNA, 25 bp, Probe sequence
gcgcagacagttcaagatagtgccc

SEQ ID NO: 264575 - DNA, 25 bp, Probe sequence
gaattagcgcgtagacatcataagc

SEQ ID NO: 264576 - DNA, 25 bp, Probe sequence
gaagtagcagatgaactttatcatt

SEQ ID NO: 264577 - DNA, 25 bp, Probe sequence
gaacgacaaaatatcgaacagtggt

SEQ ID NO: 264578 - DNA, 25 bp, Probe sequence
gacagttcaagatagtgcccaatcc

SEQ ID NO: 264579 - DNA, 25 bp, Probe sequence
gacatcataagcgcaataactttaa

SEQ ID NO: 264580 - DNA, 25 bp, Probe sequence
gatagtgcccaatccaataatgaaa

SEQ ID NO: 264581 - DNA, 25 bp, Probe sequence
gttcaagatagtgcccaatccaata

SEQ ID NO: 264582 - DNA, 25 bp, Probe sequence
gtttcaacacagaagttccattttc

SEQ ID NO: 264583 - DNA, 25 bp, Probe sequence
gtttctattcgcggtcgaaacaacg

SEQ ID NO: 264584 - DNA, 25 bp, Probe sequence
gtatgtttctattcgcggtcgaaac

SEQ ID NO: 264585 - DNA, 25 bp, Probe sequence
gtcataccaaatggaccaacatgtc

SEQ ID NO: 264586 - DNA, 25 bp, Probe sequence
gtgcccaatccaataatgaaaagtc

SEQ ID NO: 264587 - DNA, 25 bp, Probe sequence
ggtgaagaagcttttgaagtcgtaa

SEQ ID NO: 264588 - DNA, 25 bp, Probe sequence
ggtgaaacatctggtcatacgcaac

SEQ ID NO: 264589 - DNA, 25 bp, Probe sequence
ggtttagtgccagcaattttacaag

SEQ ID NO: 264590 - DNA, 25 bp, Probe sequence
ggaccaacatgtcatacaggcagtc

SEQ ID NO: 264591 - DNA, 25 bp, Probe sequence
tgatgtcataccaaatggaccaaca

SEQ ID NO: 264592 - DNA, 25 bp, Probe sequence
tgaactttatcatttatttgtcttg

SEQ ID NO: 264593 - DNA, 25 bp, Probe sequence
tcaacacagaagttccattttcagt

SEQ ID NO: 264594 - DNA, 25 bp, Probe sequence
tagtgccagcaattttacaagataa

SEQ ID NO: 264595 - DNA, 25 bp, Probe sequence
atcaagctatatcagctgccgaaac

SEQ ID NO: 264596 - DNA, 25 bp, Probe sequence
agtaaatatgtcaacgccgatagca

SEQ ID NO: 264597 - DNA, 25 bp, Probe sequence
agcagtaaatatgtcaacgccgata

SEQ ID NO: 264598 - DNA, 25 bp, Probe sequence
agctatatcagctgccgaaaccatt

SEQ ID NO: 264599 - DNA, 25 bp, Probe sequence
acgtactgcgttagaaggtcaaatc

SEQ ID NO: 264600 - DNA, 25 bp, Probe sequence
actgcgttagaaggtcaaatcaatc

SEQ ID NO: 264601 - DNA, 25 bp, Probe sequence
acagcgaaaacagcggttgaacaag

SEQ ID NO: 264602 - DNA, 25 bp, Probe sequence
acaatcaagctatatcagctgccga

SEQ ID NO: 264603 - DNA, 25 bp, Probe sequence
acaacgtactgcgttagaaggtcaa

SEQ ID NO: 264604 - DNA, 25 bp, Probe sequence
aaacagcggttgaacaagcacttaa

SEQ ID NO: 264605 - DNA, 25 bp, Probe sequence
aacagcggttgaacaagcacttaat

SEQ ID NO: 264606 - DNA, 25 bp, Probe sequence
aacgtactgcgttagaaggtcaaat

SEQ ID NO: 264607 - DNA, 25 bp, Probe sequence
aagctatatcagctgccgaaaccat

SEQ ID NO: 264608 - DNA, 25 bp, Probe sequence
aagcagtaaatatgtcaacgccgat

SEQ ID NO: 264609 - DNA, 25 bp, Probe sequence
aatcaagctatatcagctgccgaaa

SEQ ID NO: 264610 - DNA, 25 bp, Probe sequence
caatcaagctatatcagctgccgaa

SEQ ID NO: 264611 - DNA, 25 bp, Probe sequence
caagctatatcagctgccgaaacca

SEQ ID NO: 264612 - DNA, 25 bp, Probe sequence
cgtactgcgttagaaggtcaaatca

SEQ ID NO: 264613 - DNA, 25 bp, Probe sequence
ctatatcagctgccgaaaccatttt

SEQ ID NO: 264614 - DNA, 25 bp, Probe sequence
ctgcgttagaaggtcaaatcaatca

SEQ ID NO: 264615 - DNA, 25 bp, Probe sequence
cgaaaacagcggttgaacaagcact

SEQ ID NO: 264616 - DNA, 25 bp, Probe sequence
cgcgtatctaatgcaaatgatgtac

SEQ ID NO: 264617 - DNA, 25 bp, Probe sequence
gcgaaaacagcggttgaacaagcac

SEQ ID NO: 264618 - DNA, 25 bp, Probe sequence
gctatatcagctgccgaaaccattt

SEQ ID NO: 264619 - DNA, 25 bp, Probe sequence
gcttacaatcaagctatatcagctg

SEQ ID NO: 264620 - DNA, 25 bp, Probe sequence
gtactgcgttagaaggtcaaatcaa

SEQ ID NO: 264621 - DNA, 25 bp, Probe sequence
gtaaatatgtcaacgccgatagcac

SEQ ID NO: 264622 - DNA, 25 bp, Probe sequence
tcaagctatatcagctgccgaaacc

SEQ ID NO: 264623 - DNA, 25 bp, Probe sequence
taatgcaaatgatgtacaacgtaat

SEQ ID NO: 264624 - DNA, 25 bp, Probe sequence
tacagcgaaaacagcggttgaacaa

SEQ ID NO: 264625 - DNA, 25 bp, Probe sequence
tacaatcaagctatatcagctgccg

SEQ ID NO: 264626 - DNA, 25 bp, Probe sequence
tactgcgttagaaggtcaaatcaat

SEQ ID NO: 264627 - DNA, 25 bp, Probe sequence
tatatcagctgccgaaaccatttta

SEQ ID NO: 264628 - DNA, 25 bp, Probe sequence
ttacaatcaagctatatcagctgcc

SEQ ID NO: 264629 - DNA, 25 bp, Probe sequence
ataaagatcatggtacgaataaaga

SEQ ID NO: 264630 - DNA, 25 bp, Probe sequence
atgttactgcggcaacacaacgtgt

SEQ ID NO: 264631 - DNA, 25 bp, Probe sequence
acgattagagtcagcaatcgcaaat

SEQ ID NO: 264632 - DNA, 25 bp, Probe sequence
acaaacccttcattagatccgactg

SEQ ID NO: 264633 - DNA, 25 bp, Probe sequence
aaacccttcattagatccgactgtt

SEQ ID NO: 264634 - DNA, 25 bp, Probe sequence
aaacaagctgttactaatcaaatta

SEQ ID NO: 264635 - DNA, 25 bp, Probe sequence
aacaagcaacgcaatctttaggttc

SEQ ID NO: 264636 - DNA, 25 bp, Probe sequence
aactacaaacccttcattagatccg

SEQ ID NO: 264637 - DNA, 25 bp, Probe sequence
aactggtgtacaaagtgtgaaagac

SEQ ID NO: 264638 - DNA, 25 bp, Probe sequence
aacgcaatctttaggttcattagac

SEQ ID NO: 264639 - DNA, 25 bp, Probe sequence
aagcaacgcaatctttaggttcatt

SEQ ID NO: 264640 - DNA, 25 bp, Probe sequence
caatccaacaagtaaatgcagcaaa

SEQ ID NO: 264641 - DNA, 25 bp, Probe sequence
caaactacaaacccttcattagatc

SEQ ID NO: 264642 - DNA, 25 bp, Probe sequence
caaacccttcattagatccgactgt

SEQ ID NO: 264643 - DNA, 25 bp, Probe sequence
gcgcaaaaacaagctgttactaatc

SEQ ID NO: 264644 - DNA, 25 bp, Probe sequence
gcgaagcaacaagcaacgcaatctt

SEQ ID NO: 264645 - DNA, 25 bp, Probe sequence
gctgttactaatcaaattaatggcg

SEQ ID NO: 264646 - DNA, 25 bp, Probe sequence
gcagatgttactgcggcaacacaac

SEQ ID NO: 264647 - DNA, 25 bp, Probe sequence
gcagcagatgttactgcggcaacac

SEQ ID NO: 264648 - DNA, 25 bp, Probe sequence
gcacgtctaaaaatgctttaaatgg

SEQ ID NO: 264649 - DNA, 25 bp, Probe sequence
gcaacaaatcttgacaatgcaatga

SEQ ID NO: 264650 - DNA, 25 bp, Probe sequence
gcaacaagcaacgcaatctttaggt

SEQ ID NO: 264651 - DNA, 25 bp, Probe sequence
gcaacgcaatctttaggttcattag

SEQ ID NO: 264652 - DNA, 25 bp, Probe sequence
gcaatgcaacgattagagtcagcaa

SEQ ID NO: 264653 - DNA, 25 bp, Probe sequence
gaagcaacaagcaacgcaatcttta

SEQ ID NO: 264654 - DNA, 25 bp, Probe sequence
gaaaacttagaggcagcgaagcaac

SEQ ID NO: 264655 - DNA, 25 bp, Probe sequence
gacaatgcaacaaatcttgacaatg

SEQ ID NO: 264656 - DNA, 25 bp, Probe sequence
gacacaagtaactggtgtacaaagt

SEQ ID NO: 264657 - DNA, 25 bp, Probe sequence
gaggcagcgaagcaacaagcaacgc

SEQ ID NO: 264658 - DNA, 25 bp, Probe sequence
gatcaaactacaaacccttcattag

SEQ ID NO: 264659 - DNA, 25 bp, Probe sequence
ggcagcgaagcaacaagcaacgcaa

SEQ ID NO: 264660 - DNA, 25 bp, Probe sequence
tgttactgcggcaacacaacgtgtc

SEQ ID NO: 264661 - DNA, 25 bp, Probe sequence
tacaaacccttcattagatccgact

SEQ ID NO: 264662 - DNA, 25 bp, Probe sequence
ttgatcaaactacaaacccttcatt

SEQ ID NO: 264663 - DNA, 25 bp, Probe sequence
ataactctaatgatcttaaccaagc

SEQ ID NO: 264664 - DNA, 25 bp, Probe sequence
atcaagtagcggcaactgtgaatac

SEQ ID NO: 264665 - DNA, 25 bp, Probe sequence
atgcgattaatcaagtagcggcaac

SEQ ID NO: 264666 - DNA, 25 bp, Probe sequence
atgcagattctgacaagcaaaatgc

SEQ ID NO: 264667 - DNA, 25 bp, Probe sequence
agaactaccacgatgctgatgtcga

SEQ ID NO: 264668 - DNA, 25 bp, Probe sequence
actaccacgatgctgatgtcgataa

SEQ ID NO: 264669 - DNA, 25 bp, Probe sequence
aaagatcaaatattagcggacggta

SEQ ID NO: 264670 - DNA, 25 bp, Probe sequence
aaaagcagttacaactatgaatcaa

SEQ ID NO: 264671 - DNA, 25 bp, Probe sequence
aacaaacggttagccaattagcaca

SEQ ID NO: 264672 - DNA, 25 bp, Probe sequence
aacaattgacacatgcttttaaaca

SEQ ID NO: 264673 - DNA, 25 bp, Probe sequence
aactaccacgatgctgatgtcgata

SEQ ID NO: 264674 - DNA, 25 bp, Probe sequence
aaccaagcacagaaagatgcattaa

SEQ ID NO: 264675 - DNA, 25 bp, Probe sequence
aagctaaattagccactgaaaagca

SEQ ID NO: 264676 - DNA, 25 bp, Probe sequence
aagatcaaatattagcggacggtaa

SEQ ID NO: 264677 - DNA, 25 bp, Probe sequence
aatgatcttaaccaagcacagaaag

SEQ ID NO: 264678 - DNA, 25 bp, Probe sequence
caattgacacatgcttttaaacaag

SEQ ID NO: 264679 - DNA, 25 bp, Probe sequence
caagtagcggcaactgtgaatacaa

SEQ ID NO: 264680 - DNA, 25 bp, Probe sequence
cagattctgacaagcaaaatgcata

SEQ ID NO: 264681 - DNA, 25 bp, Probe sequence
ctaccacgatgctgatgtcgataag

SEQ ID NO: 264682 - DNA, 25 bp, Probe sequence
ctaatgatcttaaccaagcacagaa

SEQ ID NO: 264683 - DNA, 25 bp, Probe sequence
cggtgaagctaaattagccactgaa

SEQ ID NO: 264684 - DNA, 25 bp, Probe sequence
gcgattaatcaagtagcggcaactg

SEQ ID NO: 264685 - DNA, 25 bp, Probe sequence
gcaaataaagatactgtgaaagcaa

SEQ ID NO: 264686 - DNA, 25 bp, Probe sequence
gcaagtgagaactaccacgatgctg

SEQ ID NO: 264687 - DNA, 25 bp, Probe sequence
gaactaccacgatgctgatgtcgat

SEQ ID NO: 264688 - DNA, 25 bp, Probe sequence
gacacatgcttttaaacaagctaaa

SEQ ID NO: 264689 - DNA, 25 bp, Probe sequence
gatcatgctaaacaaacggttagcc

SEQ ID NO: 264690 - DNA, 25 bp, Probe sequence
gattaatcaagtagcggcaactgtg

SEQ ID NO: 264691 - DNA, 25 bp, Probe sequence
gtcaatgcagattctgacaagcaaa

SEQ ID NO: 264692 - DNA, 25 bp, Probe sequence
tgaacaattgacacatgcttttaaa

SEQ ID NO: 264693 - DNA, 25 bp, Probe sequence
taatcaagtagcggcaactgtgaat

SEQ ID NO: 264694 - DNA, 25 bp, Probe sequence
taataactctaatgatcttaaccaa

SEQ ID NO: 264695 - DNA, 25 bp, Probe sequence
taaattagccactgaaaagcaaaat

SEQ ID NO: 264696 - DNA, 25 bp, Probe sequence
tataacaatgcggtagcgcatgctg

SEQ ID NO: 264697 - DNA, 25 bp, Probe sequence
atatattgacgaacagcaccttggt

SEQ ID NO: 264698 - DNA, 25 bp, Probe sequence
atcgaatcaatcaaatactgcaaca

SEQ ID NO: 264699 - DNA, 25 bp, Probe sequence
agcgattcaacgtgcgcaaagcatc

SEQ ID NO: 264700 - DNA, 25 bp, Probe sequence
actagctagtttctggttcttcatt

SEQ ID NO: 264701 - DNA, 25 bp, Probe sequence
aaatcgtctgggcaaaacttaactg

SEQ ID NO: 264702 - DNA, 25 bp, Probe sequence
aaatcatccatttaacagttcgact

SEQ ID NO: 264703 - DNA, 25 bp, Probe sequence
aaatgcagcgcctacaagaacagag

SEQ ID NO: 264704 - DNA, 25 bp, Probe sequence
aaacttcgatgatgccaaacgtcta

SEQ ID NO: 264705 - DNA, 25 bp, Probe sequence
aaaacttgctcgtgatcaacaacaa

SEQ ID NO: 264706 - DNA, 25 bp, Probe sequence
aactgctactgaacttgatcacgcg

SEQ ID NO: 264707 - DNA, 25 bp, Probe sequence
aagcaacacctgagcaaatcctagt

SEQ ID NO: 264708 - DNA, 25 bp, Probe sequence
aatgcacctgatgttcattcagttg

SEQ ID NO: 264709 - DNA, 25 bp, Probe sequence
cgacgaaacttcaaccaatcgctga

SEQ ID NO: 264710 - DNA, 25 bp, Probe sequence
cgaagcttcaaatgcgacggatcaa

SEQ ID NO: 264711 - DNA, 25 bp, Probe sequence
gctaaagcacaacttgcgcaagcat

SEQ ID NO: 264712 - DNA, 25 bp, Probe sequence
gctattggtgtggtgggtatctctg

SEQ ID NO: 264713 - DNA, 25 bp, Probe sequence
gcaccttggtgttatcagcagcaca

SEQ ID NO: 264714 - DNA, 25 bp, Probe sequence
gaggacgttcctttattattggcta

SEQ ID NO: 264715 - DNA, 25 bp, Probe sequence
gaggttgcacaacatgttcaaactg

SEQ ID NO: 264716 - DNA, 25 bp, Probe sequence
gataacgaacattcaccactcttat

SEQ ID NO: 264717 - DNA, 25 bp, Probe sequence
gatacaccatcaactgcaacgattt

SEQ ID NO: 264718 - DNA, 25 bp, Probe sequence
gtaatcaggctgtatctcaagttca

SEQ ID NO: 264719 - DNA, 25 bp, Probe sequence
gggtatctctggcttactagctagt

SEQ ID NO: 264720 - DNA, 25 bp, Probe sequence
ggtgaactcattgtacatcgtgatg

SEQ ID NO: 264721 - DNA, 25 bp, Probe sequence
ggtaatccaacactcgacaaatcac

SEQ ID NO: 264722 - DNA, 25 bp, Probe sequence
ggagaccaaaaccttgcaaatgcca

SEQ ID NO: 264723 - DNA, 25 bp, Probe sequence
ggcaaacagcatcatcaacaacatt

SEQ ID NO: 264724 - DNA, 25 bp, Probe sequence
tgatccacttcatatgcgtcacttt

SEQ ID NO: 264725 - DNA, 25 bp, Probe sequence
tcaaacagcaggcaaccacgcgatt

SEQ ID NO: 264726 - DNA, 25 bp, Probe sequence
tcaccactcttattcgcaaaacgac

SEQ ID NO: 264727 - DNA, 25 bp, Probe sequence
tcaatggcgcaatccaagcagtcaa

SEQ ID NO: 264728 - DNA, 25 bp, Probe sequence
taaacatacgccgttcttcttacca

SEQ ID NO: 264729 - DNA, 25 bp, Probe sequence
taccacttttatttgcgaaacgtcg

SEQ ID NO: 264730 - DNA, 25 bp, Probe sequence
ttcttcattgccaaacgtcgtcgta

SEQ ID NO: 264731 - DNA, 25 bp, Probe sequence
atacgcaagctgtcacagcggctga

SEQ ID NO: 264732 - DNA, 25 bp, Probe sequence
ataacgttcaacacactgcaactga

SEQ ID NO: 264733 - DNA, 25 bp, Probe sequence
aggccaaatcaatcaagcgacgact

SEQ ID NO: 264734 - DNA, 25 bp, Probe sequence
atggcgcgcatactgttgatgaagc

SEQ ID NO: 264735 - DNA, 25 bp, Probe sequence
agtggtacaccgaatgcgacattaa

SEQ ID NO: 264736 - DNA, 25 bp, Probe sequence
agatcgtgcgaaacaggctgctaac

SEQ ID NO: 264737 - DNA, 25 bp, Probe sequence
actgccatgggtgcattacgtacaa

SEQ ID NO: 264738 - DNA, 25 bp, Probe sequence
acaccaacgttaacaccagcagatg

SEQ ID NO: 264739 - DNA, 25 bp, Probe sequence
aaagcagcgcttaatggtactcaaa

SEQ ID NO: 264740 - DNA, 25 bp, Probe sequence
aagcgacgactgttgatggcgttaa

SEQ ID NO: 264741 - DNA, 25 bp, Probe sequence
aagcagcagttgaccgtgcattaca

SEQ ID NO: 264742 - DNA, 25 bp, Probe sequence
aagtgtctacaacggcatctgaatt

SEQ ID NO: 264743 - DNA, 25 bp, Probe sequence
aatgctgtcacaactgcacaaggta

SEQ ID NO: 264744 - DNA, 25 bp, Probe sequence
caagcgtcacaatcattaggttcat

SEQ ID NO: 264745 - DNA, 25 bp, Probe sequence
gccgttgaaaacgcgttgtcacaag

SEQ ID NO: 264746 - DNA, 25 bp, Probe sequence
gcggctttaaatggtgctgacaact

SEQ ID NO: 264747 - DNA, 25 bp, Probe sequence
gaatgcacaacgtactgacttagaa

SEQ ID NO: 264748 - DNA, 25 bp, Probe sequence
gacagctttaaagcgtgccattgct

SEQ ID NO: 264749 - DNA, 25 bp, Probe sequence
gactgttatcaatcaagctgctgga

SEQ ID NO: 264750 - DNA, 25 bp, Probe sequence
gtgcggcatcacaagtcaatgcggc

SEQ ID NO: 264751 - DNA, 25 bp, Probe sequence
gatggtttacctaacttaacacaat

SEQ ID NO: 264752 - DNA, 25 bp, Probe sequence
gaggcagcgaaacaacaagcgtcac

SEQ ID NO: 264753 - DNA, 25 bp, Probe sequence
gatggtgcaacaacagtagctggtg

SEQ ID NO: 264754 - DNA, 25 bp, Probe sequence
gatgctaaacgaactgcttattctc

SEQ ID NO: 264755 - DNA, 25 bp, Probe sequence
gttgctaatgcgaaaggtgccctaa

SEQ ID NO: 264756 - DNA, 25 bp, Probe sequence
gttagtggtacaccaacaccaacgt

SEQ ID NO: 264757 - DNA, 25 bp, Probe sequence
gtccaactttagatccgactgttat

SEQ ID NO: 264758 - DNA, 25 bp, Probe sequence
gtgggtcaagcgacgacgttgccaa

SEQ ID NO: 264759 - DNA, 25 bp, Probe sequence
ggtgttaacttcactgatgccgacg

SEQ ID NO: 264760 - DNA, 25 bp, Probe sequence
ggtgttgaacatactgcgactgaat

SEQ ID NO: 264761 - DNA, 25 bp, Probe sequence
ggtgcgcgaaacttagctcaagcta

SEQ ID NO: 264762 - DNA, 25 bp, Probe sequence
ggacttcaacatttaacaactgctc

SEQ ID NO: 264763 - DNA, 25 bp, Probe sequence
tgccatcgatggtgctactaactta

SEQ ID NO: 264764 - DNA, 25 bp, Probe sequence
tcaagctgtagctgctgcgaaagca

SEQ ID NO: 264765 - DNA, 25 bp, Probe sequence
atcgcctacgatgaatccagatgat

SEQ ID NO: 264766 - DNA, 25 bp, Probe sequence
atgatcaagctgttcaagccgcaaa

SEQ ID NO: 264767 - DNA, 25 bp, Probe sequence
agcgccacttgttacagatgtcact

SEQ ID NO: 264768 - DNA, 25 bp, Probe sequence
acacctagcgaaattactgcagcgt

SEQ ID NO: 264769 - DNA, 25 bp, Probe sequence
acaaatccaacgcttaacccagatg

SEQ ID NO: 264770 - DNA, 25 bp, Probe sequence
aaatacagccattgatcagttacca

SEQ ID NO: 264771 - DNA, 25 bp, Probe sequence
aaatgcagtgtctcaagcggaaggt

SEQ ID NO: 264772 - DNA, 25 bp, Probe sequence
aaaacaactgatcctacattagcta

SEQ ID NO: 264773 - DNA, 25 bp, Probe sequence
aacagcaacgagcctagatcaagca

SEQ ID NO: 264774 - DNA, 25 bp, Probe sequence
aatagctctaatgaccttaaccaag

SEQ ID NO: 264775 - DNA, 25 bp, Probe sequence
aattagtgctacgcctgatgttgtc

SEQ ID NO: 264776 - DNA, 25 bp, Probe sequence
aattaatcaaactacatcgcctacg

SEQ ID NO: 264777 - DNA, 25 bp, Probe sequence
caacgtggtaacttcatcaatgctg

SEQ ID NO: 264778 - DNA, 25 bp, Probe sequence
gcctgatgttgtcgttacacctagc

SEQ ID NO: 264779 - DNA, 25 bp, Probe sequence
gcgaacagtcaagtaccacagtcag

SEQ ID NO: 264780 - DNA, 25 bp, Probe sequence
gcgattgcagatcatcaagccgttg

SEQ ID NO: 264781 - DNA, 25 bp, Probe sequence
gcggcgacaacgcttaatgacgcga

SEQ ID NO: 264782 - DNA, 25 bp, Probe sequence
gcagcaactcgtggcgaagtagcac

SEQ ID NO: 264783 - DNA, 25 bp, Probe sequence
gcaacacgtgcgagcagtgcatatg

SEQ ID NO: 264784 - DNA, 25 bp, Probe sequence
gaatacaccacaacgtcaagcactt

SEQ ID NO: 264785 - DNA, 25 bp, Probe sequence
gaagcacaagcacttaaccaagcaa

SEQ ID NO: 264786 - DNA, 25 bp, Probe sequence
gaaagtcaaattacacaagcgccac

SEQ ID NO: 264787 - DNA, 25 bp, Probe sequence
gacaacacttggtacactagatcat

SEQ ID NO: 264788 - DNA, 25 bp, Probe sequence
gatgcttatactaatgcggtttcac

SEQ ID NO: 264789 - DNA, 25 bp, Probe sequence
gatcaattaacaccagctcaacaac

SEQ ID NO: 264790 - DNA, 25 bp, Probe sequence
gtaccaaacgtcaatgctattcaac

SEQ ID NO: 264791 - DNA, 25 bp, Probe sequence
gtaactttgtcaatgcagatcctga

SEQ ID NO: 264792 - DNA, 25 bp, Probe sequence
gtcagttgactttacacaagcggat

SEQ ID NO: 264793 - DNA, 25 bp, Probe sequence
gtgatgaaaaccttgcagcagctaa

SEQ ID NO: 264794 - DNA, 25 bp, Probe sequence
gtgtcgcatgcagaacttgttacag

SEQ ID NO: 264795 - DNA, 25 bp, Probe sequence
ggtaatgccaacgttcaacatgcaa

SEQ ID NO: 264796 - DNA, 25 bp, Probe sequence
tggcggcaatgcaacacaagctgaa

SEQ ID NO: 264797 - DNA, 25 bp, Probe sequence
taatccgcaacgtcaagcacttgaa

SEQ ID NO: 264798 - DNA, 25 bp, Probe sequence
taccaacacctgtattgacgcctga

SEQ ID NO: 264799 - DNA, 25 bp, Probe sequence
atatattgacgaacagcaccttggt

SEQ ID NO: 264800 - DNA, 25 bp, Probe sequence
agtcatcgatacaccatcaactgca

SEQ ID NO: 264801 - DNA, 25 bp, Probe sequence
agcgattcaacgtgcgcaaagcatc

SEQ ID NO: 264802 - DNA, 25 bp, Probe sequence
actagctagtttctggttcttcatt

SEQ ID NO: 264803 - DNA, 25 bp, Probe sequence
aaatcatccatttaacagttcgact

SEQ ID NO: 264804 - DNA, 25 bp, Probe sequence
aaatgcagcgcctacaagaacagag

SEQ ID NO: 264805 - DNA, 25 bp, Probe sequence
aaacgctattggtgtggtgggtatc

SEQ ID NO: 264806 - DNA, 25 bp, Probe sequence
aaacttcgatgatgccaaacgtcta

SEQ ID NO: 264807 - DNA, 25 bp, Probe sequence
aaaacttgctcgtgatcaacaacaa

SEQ ID NO: 264808 - DNA, 25 bp, Probe sequence
aactgctactgaacttgatcacgcg

SEQ ID NO: 264809 - DNA, 25 bp, Probe sequence
aagccaaagcacaacttgcgcaagc

SEQ ID NO: 264810 - DNA, 25 bp, Probe sequence
aagcaacacctgagcaaatcctagt

SEQ ID NO: 264811 - DNA, 25 bp, Probe sequence
aagaacgtttagcgcaagcattgca

SEQ ID NO: 264812 - DNA, 25 bp, Probe sequence
caactgcaacgatttctgatagctt

SEQ ID NO: 264813 - DNA, 25 bp, Probe sequence
cgaagcttcaaatgcgacggatcaa

SEQ ID NO: 264814 - DNA, 25 bp, Probe sequence
gcgacgaaacttcaaccaattgctg

SEQ ID NO: 264815 - DNA, 25 bp, Probe sequence
gcaccttggtgttatcagcagcaca

SEQ ID NO: 264816 - DNA, 25 bp, Probe sequence
gaggacgttcctttattattggcta

SEQ ID NO: 264817 - DNA, 25 bp, Probe sequence
gaggttgcacaacatgttcaaactg

SEQ ID NO: 264818 - DNA, 25 bp, Probe sequence
gatcagctttcagcagaagtcatcg

SEQ ID NO: 264819 - DNA, 25 bp, Probe sequence
gataacgaacattcaccactcttat

SEQ ID NO: 264820 - DNA, 25 bp, Probe sequence
gtaatcaggctgtatctcaagttca

SEQ ID NO: 264821 - DNA, 25 bp, Probe sequence
ggtgggtatctctggtttactagct

SEQ ID NO: 264822 - DNA, 25 bp, Probe sequence
ggtgaactcattgtacatcgtgatg

SEQ ID NO: 264823 - DNA, 25 bp, Probe sequence
ggtaatccaacactcgacaaatcac

SEQ ID NO: 264824 - DNA, 25 bp, Probe sequence
ggagaccaaaaccttgcaaatgcca

SEQ ID NO: 264825 - DNA, 25 bp, Probe sequence
ggcaaacagcatcatcaacaacatt

SEQ ID NO: 264826 - DNA, 25 bp, Probe sequence
tgatccacttcatatgcgtcacttt

SEQ ID NO: 264827 - DNA, 25 bp, Probe sequence
tcaaacagcaggcaaccacgcgatt

SEQ ID NO: 264828 - DNA, 25 bp, Probe sequence
tcaccactcttattcgcaaaacgac

SEQ ID NO: 264829 - DNA, 25 bp, Probe sequence
tcaatggcgcaatccaagcagtcaa

SEQ ID NO: 264830 - DNA, 25 bp, Probe sequence
taaacatacgccgttcttcttacca

SEQ ID NO: 264831 - DNA, 25 bp, Probe sequence
taccacttttatttgcgaaacgtcg

SEQ ID NO: 264832 - DNA, 25 bp, Probe sequence
ttcttcattgccaaacgtcgtcgta

SEQ ID NO: 264833 - DNA, 25 bp, Probe sequence
ataaccaagcagtaacagctactaa

SEQ ID NO: 264834 - DNA, 25 bp, Probe sequence
atgcgaatactgccattgatcagtt

SEQ ID NO: 264835 - DNA, 25 bp, Probe sequence
agatgctgtcaatgcaatgacgcat

SEQ ID NO: 264836 - DNA, 25 bp, Probe sequence
acgatcaagcagtgcaagccgcaaa

SEQ ID NO: 264837 - DNA, 25 bp, Probe sequence
acaccagcacaacaacaagcactag

SEQ ID NO: 264838 - DNA, 25 bp, Probe sequence
acaactagaacagccgttaaccatg

SEQ ID NO: 264839 - DNA, 25 bp, Probe sequence
acaactggcgaatctaacacactta

SEQ ID NO: 264840 - DNA, 25 bp, Probe sequence
aaatctagatacgttgcgtgactta

SEQ ID NO: 264841 - DNA, 25 bp, Probe sequence
aacaagcgttaacaacacaagttga

SEQ ID NO: 264842 - DNA, 25 bp, Probe sequence
aacaactggcgaatctaacacactt

SEQ ID NO: 264843 - DNA, 25 bp, Probe sequence
aacatcacctacaatgaatccagat

SEQ ID NO: 264844 - DNA, 25 bp, Probe sequence
aagcagttactacaatgaatcaagc

SEQ ID NO: 264845 - DNA, 25 bp, Probe sequence
aaggtaatgtaacaagtgcgacaca

SEQ ID NO: 264846 - DNA, 25 bp, Probe sequence
aatccaatgcttaacccagatgata

SEQ ID NO: 264847 - DNA, 25 bp, Probe sequence
aattagcggcacacctgatgttgtc

SEQ ID NO: 264848 - DNA, 25 bp, Probe sequence
caattgccaaacttgaatcaagcgc

SEQ ID NO: 264849 - DNA, 25 bp, Probe sequence
caacttggtaacttcgtcaatgctg

SEQ ID NO: 264850 - DNA, 25 bp, Probe sequence
caagcgaaacaacaactggcgaatc

SEQ ID NO: 264851 - DNA, 25 bp, Probe sequence
caacgtgatgcgttacgtaatcaaa

SEQ ID NO: 264852 - DNA, 25 bp, Probe sequence
cacaagcgttagatcatgcaatgga

SEQ ID NO: 264853 - DNA, 25 bp, Probe sequence
cattaaccaaacaacatcacctaca

SEQ ID NO: 264854 - DNA, 25 bp, Probe sequence
gccgttaaccatgatttgactgaag

SEQ ID NO: 264855 - DNA, 25 bp, Probe sequence
gcggcaactacgcttaatgatgcga

SEQ ID NO: 264856 - DNA, 25 bp, Probe sequence
gctgatgctaaacaagctgctaaga

SEQ ID NO: 264857 - DNA, 25 bp, Probe sequence
gctgctaagacaaatcttggcacat

SEQ ID NO: 264858 - DNA, 25 bp, Probe sequence
gaagttaatcgtgcaacgacacaag

SEQ ID NO: 264859 - DNA, 25 bp, Probe sequence
gaagcattaattagcggcacacctg

SEQ ID NO: 264860 - DNA, 25 bp, Probe sequence
gaagcagaagccatgattaacaaac

SEQ ID NO: 264861 - DNA, 25 bp, Probe sequence
gaacaacaaaactacgatcaagcag

SEQ ID NO: 264862 - DNA, 25 bp, Probe sequence
gaaaaccttgtagcagctaagcaac

SEQ ID NO: 264863 - DNA, 25 bp, Probe sequence
gtagcagctaagcaacaagcgaaca

SEQ ID NO: 264864 - DNA, 25 bp, Probe sequence
gtgcgacacaagctgtaacatcatc

SEQ ID NO: 264865 - DNA, 25 bp, Probe sequence
ggtaatacgaacttagcaacaacga

SEQ ID NO: 264866 - DNA, 25 bp, Probe sequence
tagaccaattaacaccagcacaaca

SEQ ID NO: 264867 - DNA, 25 bp, Probe sequence
atgatcaagctgttcaagccgcaaa

SEQ ID NO: 264868 - DNA, 25 bp, Probe sequence
atggcgcgcatactgttgatgaagc

SEQ ID NO: 264869 - DNA, 25 bp, Probe sequence
agtcgatgctgcgcaaactgttgca

SEQ ID NO: 264870 - DNA, 25 bp, Probe sequence
agcgccacttgttacagatgtcact

SEQ ID NO: 264871 - DNA, 25 bp, Probe sequence
acacctagcgaaattactgcagcgt

SEQ ID NO: 264872 - DNA, 25 bp, Probe sequence
acaaatccaacgcttaacccagatg

SEQ ID NO: 264873 - DNA, 25 bp, Probe sequence
acaacaatgcggtaactgctgctga

SEQ ID NO: 264874 - DNA, 25 bp, Probe sequence
aaatgcagtgtctcaagcggaaggt

SEQ ID NO: 264875 - DNA, 25 bp, Probe sequence
aaagcagcgcttaatggtactcaaa

SEQ ID NO: 264876 - DNA, 25 bp, Probe sequence
aaagacactacacttggcagtcaaa

SEQ ID NO: 264877 - DNA, 25 bp, Probe sequence
aatgctgtcacaactgcacaaggta

SEQ ID NO: 264878 - DNA, 25 bp, Probe sequence
aatagctctaatgaccttaaccaag

SEQ ID NO: 264879 - DNA, 25 bp, Probe sequence
aattagtgctacgcctgatgttgtc

SEQ ID NO: 264880 - DNA, 25 bp, Probe sequence
caacgtggtaacttcatcaatgctg

SEQ ID NO: 264881 - DNA, 25 bp, Probe sequence
cattaatcaaactacatcgcctacg

SEQ ID NO: 264882 - DNA, 25 bp, Probe sequence
gcctgatgttgtcgttacacctagc

SEQ ID NO: 264883 - DNA, 25 bp, Probe sequence
gcgaacagtcaagtaccacagtcag

SEQ ID NO: 264884 - DNA, 25 bp, Probe sequence
gcgattgcagatcatcaagccgttg

SEQ ID NO: 264885 - DNA, 25 bp, Probe sequence
gcggcgacaacgcttaatgacgcga

SEQ ID NO: 264886 - DNA, 25 bp, Probe sequence
gcaacgagtcagccgacacttgatc

SEQ ID NO: 264887 - DNA, 25 bp, Probe sequence
gaagcagcactttcaactgtaacaa

SEQ ID NO: 264888 - DNA, 25 bp, Probe sequence
gaaacgactgctaacatcaaccaat

SEQ ID NO: 264889 - DNA, 25 bp, Probe sequence
gacaacacttggtacactagatcat

SEQ ID NO: 264890 - DNA, 25 bp, Probe sequence
gacacttgatccatctgcagtaaca

SEQ ID NO: 264891 - DNA, 25 bp, Probe sequence
gactgttatcaatcaagctgctgga

SEQ ID NO: 264892 - DNA, 25 bp, Probe sequence
gatgcttatactaatgcggtttcac

SEQ ID NO: 264893 - DNA, 25 bp, Probe sequence
gtccaactttagatccgactgttat

SEQ ID NO: 264894 - DNA, 25 bp, Probe sequence
gtaccaaacgtcaatgctattcaac

SEQ ID NO: 264895 - DNA, 25 bp, Probe sequence
gtaacgcaagccattcaaaccgctc

SEQ ID NO: 264896 - DNA, 25 bp, Probe sequence
gtgatgaaaaccttgcagcagctaa

SEQ ID NO: 264897 - DNA, 25 bp, Probe sequence
gtgtcgcatgcagaacttgttacag

SEQ ID NO: 264898 - DNA, 25 bp, Probe sequence
ggaaacatcaatcaagcgcacactg

SEQ ID NO: 264899 - DNA, 25 bp, Probe sequence
ggcagcgaaacaacaagcgtcacaa

SEQ ID NO: 264900 - DNA, 25 bp, Probe sequence
taccaacacctgtattgacgcctga

SEQ ID NO: 264901 - DNA, 25 bp, Probe sequence
atatattgacgaacagcaccttggt

SEQ ID NO: 264902 - DNA, 25 bp, Probe sequence
agtcatcgatacaccatcaactgca

SEQ ID NO: 264903 - DNA, 25 bp, Probe sequence
agcgattcaacgtgcgcaaagcatc

SEQ ID NO: 264904 - DNA, 25 bp, Probe sequence
actagctagtttctggttcttcatt

SEQ ID NO: 264905 - DNA, 25 bp, Probe sequence
acaacgcagcaactcgtggcgaagt

SEQ ID NO: 264906 - DNA, 25 bp, Probe sequence
aaatcatccatttaacagttcgact

SEQ ID NO: 264907 - DNA, 25 bp, Probe sequence
aaatgcagcgcctacaagaacagag

SEQ ID NO: 264908 - DNA, 25 bp, Probe sequence
aaacgctattggtgtggtgggtatc

SEQ ID NO: 264909 - DNA, 25 bp, Probe sequence
aaacttcgatgatgccaaacgtcta

SEQ ID NO: 264910 - DNA, 25 bp, Probe sequence
aactgctactgaacttgatcacgcg

SEQ ID NO: 264911 - DNA, 25 bp, Probe sequence
aagccaaagcacaacttgcgcaagc

SEQ ID NO: 264912 - DNA, 25 bp, Probe sequence
aagcaacacctgagcaaatcctagt

SEQ ID NO: 264913 - DNA, 25 bp, Probe sequence
aataatgcaacaactcgtggcgaag

SEQ ID NO: 264914 - DNA, 25 bp, Probe sequence
caactgcaacgatttctgatagctt

SEQ ID NO: 264915 - DNA, 25 bp, Probe sequence
cgaagcttcaaatgcgacggatcaa

SEQ ID NO: 264916 - DNA, 25 bp, Probe sequence
gcgacgaaacttcaaccaattgctg

SEQ ID NO: 264917 - DNA, 25 bp, Probe sequence
gcaccttggtgttatcagcagcaca

SEQ ID NO: 264918 - DNA, 25 bp, Probe sequence
gaggacgttcctttattattggcta

SEQ ID NO: 264919 - DNA, 25 bp, Probe sequence
gatcagctttcagcagaagtcatcg

SEQ ID NO: 264920 - DNA, 25 bp, Probe sequence
gatcaattaacaccagctcaacaac

SEQ ID NO: 264921 - DNA, 25 bp, Probe sequence
gataacgaacattcaccactcttat

SEQ ID NO: 264922 - DNA, 25 bp, Probe sequence
gtaatcaggctgtatctcaagttca

SEQ ID NO: 264923 - DNA, 25 bp, Probe sequence
ggtgggtatctctggtttactagct

SEQ ID NO: 264924 - DNA, 25 bp, Probe sequence
ggtaatccaacactcgacaaatcac

SEQ ID NO: 264925 - DNA, 25 bp, Probe sequence
ggagaccaaaaccttgcaaatgcca

SEQ ID NO: 264926 - DNA, 25 bp, Probe sequence
ggcaaacagcatcatcaacaacatt

SEQ ID NO: 264927 - DNA, 25 bp, Probe sequence
tgatccacttcatatgcgtcacttt

SEQ ID NO: 264928 - DNA, 25 bp, Probe sequence
tcaaacagcaggcaaccacgcgatt

SEQ ID NO: 264929 - DNA, 25 bp, Probe sequence
tcaccactcttattcgcaaaacgac

SEQ ID NO: 264930 - DNA, 25 bp, Probe sequence
tcaatggcgcaatccaagcagtcaa

SEQ ID NO: 264931 - DNA, 25 bp, Probe sequence
taatccgcaacgtcaagcacttgaa

SEQ ID NO: 264932 - DNA, 25 bp, Probe sequence
taaacatacgccgttcttcttacca

SEQ ID NO: 264933 - DNA, 25 bp, Probe sequence
taccacttttatttgcgaaacgtcg

SEQ ID NO: 264934 - DNA, 25 bp, Probe sequence
ttcttcattgccaaacgtcgtcgta

SEQ ID NO: 264935 - DNA, 25 bp, Probe sequence
atgcagtaacggcagcgaaacaggc

SEQ ID NO: 264936 - DNA, 25 bp, Probe sequence
atgatgcagtaacggcagcgaaaca

SEQ ID NO: 264937 - DNA, 25 bp, Probe sequence
atgatcatacaaatgttgagcaaac

SEQ ID NO: 264938 - DNA, 25 bp, Probe sequence
agtaacggcagcgaaacaggcatta

SEQ ID NO: 264939 - DNA, 25 bp, Probe sequence
agcaaacagttgattacacgcaagc

SEQ ID NO: 264940 - DNA, 25 bp, Probe sequence
agctgttaatgatcatacaaatgtt

SEQ ID NO: 264941 - DNA, 25 bp, Probe sequence
acggcagcgaaacaggcattaaatg

SEQ ID NO: 264942 - DNA, 25 bp, Probe sequence
acagttgattacacgcaagcagatt

SEQ ID NO: 264943 - DNA, 25 bp, Probe sequence
acaacaagctgttaatgatcataca

SEQ ID NO: 264944 - DNA, 25 bp, Probe sequence
aaatgatgcagtaacggcagcgaaa

SEQ ID NO: 264945 - DNA, 25 bp, Probe sequence
aaacagttgattacacgcaagcaga

SEQ ID NO: 264946 - DNA, 25 bp, Probe sequence
aacaagctgttaatgatcatacaaa

SEQ ID NO: 264947 - DNA, 25 bp, Probe sequence
aacagttgattacacgcaagcagat

SEQ ID NO: 264948 - DNA, 25 bp, Probe sequence
aacggcagcgaaacaggcattaaat

SEQ ID NO: 264949 - DNA, 25 bp, Probe sequence
aatgatgcagtaacggcagcgaaac

SEQ ID NO: 264950 - DNA, 25 bp, Probe sequence
caagctgttaatgatcatacaaatg

SEQ ID NO: 264951 - DNA, 25 bp, Probe sequence
caacaagctgttaatgatcatacaa

SEQ ID NO: 264952 - DNA, 25 bp, Probe sequence
caaacagttgattacacgcaagcag

SEQ ID NO: 264953 - DNA, 25 bp, Probe sequence
cagtaacggcagcgaaacaggcatt

SEQ ID NO: 264954 - DNA, 25 bp, Probe sequence
cagttgattacacgcaagcagattc

SEQ ID NO: 264955 - DNA, 25 bp, Probe sequence
gcagtaacggcagcgaaacaggcat

SEQ ID NO: 264956 - DNA, 25 bp, Probe sequence
gcaaacagttgattacacgcaagca

SEQ ID NO: 264957 - DNA, 25 bp, Probe sequence
gagcaaacagttgattacacgcaag

SEQ ID NO: 264958 - DNA, 25 bp, Probe sequence
gatgcagtaacggcagcgaaacagg

SEQ ID NO: 264959 - DNA, 25 bp, Probe sequence
gttgagcaaacagttgattacacgc

SEQ ID NO: 264960 - DNA, 25 bp, Probe sequence
gttaatgatcatacaaatgttgagc

SEQ ID NO: 264961 - DNA, 25 bp, Probe sequence
gtaacggcagcgaaacaggcattaa

SEQ ID NO: 264962 - DNA, 25 bp, Probe sequence
tgatgcagtaacggcagcgaaacag

SEQ ID NO: 264963 - DNA, 25 bp, Probe sequence
tgatcatacaaatgttgagcaaaca

SEQ ID NO: 264964 - DNA, 25 bp, Probe sequence
tgagcaaacagttgattacacgcaa

SEQ ID NO: 264965 - DNA, 25 bp, Probe sequence
tgcagtaacggcagcgaaacaggca

SEQ ID NO: 264966 - DNA, 25 bp, Probe sequence
taacggcagcgaaacaggcattaaa

SEQ ID NO: 264967 - DNA, 25 bp, Probe sequence
taaatgatgcagtaacggcagcgaa

SEQ ID NO: 264968 - DNA, 25 bp, Probe sequence
ttgagcaaacagttgattacacgca

SEQ ID NO: 264969 - DNA, 25 bp, Probe sequence
atacagtggtgttacatggatgggc

SEQ ID NO: 264970 - DNA, 25 bp, Probe sequence
atgttgcaccatacagtggtgttac

SEQ ID NO: 264971 - DNA, 25 bp, Probe sequence
agtggtgttacatggatgggcgctg

SEQ ID NO: 264972 - DNA, 25 bp, Probe sequence
accatacagtggtgttacatggatg

SEQ ID NO: 264973 - DNA, 25 bp, Probe sequence
acatggatgggcgctggaacaggat

SEQ ID NO: 264974 - DNA, 25 bp, Probe sequence
acagtggtgttacatggatgggcgc

SEQ ID NO: 264975 - DNA, 25 bp, Probe sequence
aatgttgcaccatacagtggtgtta

SEQ ID NO: 264976 - DNA, 25 bp, Probe sequence
caccatacagtggtgttacatggat

SEQ ID NO: 264977 - DNA, 25 bp, Probe sequence
cagtggtgttacatggatgggcgct

SEQ ID NO: 264978 - DNA, 25 bp, Probe sequence
catggatgggcgctggaacaggatt

SEQ ID NO: 264979 - DNA, 25 bp, Probe sequence
catacagtggtgttacatggatggg

SEQ ID NO: 264980 - DNA, 25 bp, Probe sequence
ccatacagtggtgttacatggatgg

SEQ ID NO: 264981 - DNA, 25 bp, Probe sequence
gcaccatacagtggtgttacatgga

SEQ ID NO: 264982 - DNA, 25 bp, Probe sequence
gttgcaccatacagtggtgttacat

SEQ ID NO: 264983 - DNA, 25 bp, Probe sequence
gttacatggatgggcgctggaacag

SEQ ID NO: 264984 - DNA, 25 bp, Probe sequence
gtgttacatggatgggcgctggaac

SEQ ID NO: 264985 - DNA, 25 bp, Probe sequence
gtggtgttacatggatgggcgctgg

SEQ ID NO: 264986 - DNA, 25 bp, Probe sequence
ggtgttacatggatgggcgctggaa

SEQ ID NO: 264987 - DNA, 25 bp, Probe sequence
tggtgttacatggatgggcgctgga

SEQ ID NO: 264988 - DNA, 25 bp, Probe sequence
tgttacatggatgggcgctggaaca

SEQ ID NO: 264989 - DNA, 25 bp, Probe sequence
tgttgcaccatacagtggtgttaca

SEQ ID NO: 264990 - DNA, 25 bp, Probe sequence
tgcaccatacagtggtgttacatgg

SEQ ID NO: 264991 - DNA, 25 bp, Probe sequence
tacatggatgggcgctggaacagga

SEQ ID NO: 264992 - DNA, 25 bp, Probe sequence
tacagtggtgttacatggatgggcg

SEQ ID NO: 264993 - DNA, 25 bp, Probe sequence
ttacatggatgggcgctggaacagg

SEQ ID NO: 264994 - DNA, 25 bp, Probe sequence
ttgcaccatacagtggtgttacatg

SEQ ID NO: 264995 - DNA, 25 bp, Probe sequence
atattatagcgcatcccaatggtga

SEQ ID NO: 264996 - DNA, 25 bp, Probe sequence
attatagcgcatcccaatggtgaat

SEQ ID NO: 264997 - DNA, 25 bp, Probe sequence
agtgctgtcagttaaaggcaacatg

SEQ ID NO: 264998 - DNA, 25 bp, Probe sequence
agataaagctgttcatccaaaaaac

SEQ ID NO: 264999 - DNA, 25 bp, Probe sequence
actcaggttcagctgtatttaacag

SEQ ID NO: 265000 - DNA, 25 bp, Probe sequence
acatattatagcgcatcccaatggt

SEQ ID NO: 265001 - DNA, 25 bp, Probe sequence
aaagctgttcatccaaaaaacagga

SEQ ID NO: 265002 - DNA, 25 bp, Probe sequence
aaaattgtccgttattcaggtcaag

SEQ ID NO: 265003 - DNA, 25 bp, Probe sequence
aacggctaaagctgaacataatgtg

SEQ ID NO: 265004 - DNA, 25 bp, Probe sequence
aagattacacaggcattttaaaaat

SEQ ID NO: 265005 - DNA, 25 bp, Probe sequence
aattgttaccaacaagcatgtcgtt

SEQ ID NO: 265006 - DNA, 25 bp, Probe sequence
aattgtccgttattcaggtcaagaa

SEQ ID NO: 265007 - DNA, 25 bp, Probe sequence
cggctaaagctgaacataatgtgaa

SEQ ID NO: 265008 - DNA, 25 bp, Probe sequence
gcgtcggcacaacagtggttgaggg

SEQ ID NO: 265009 - DNA, 25 bp, Probe sequence
gctgtcagttaaaggcaacatgatt

SEQ ID NO: 265010 - DNA, 25 bp, Probe sequence
gcacatattatagcgcatcccaatg

SEQ ID NO: 265011 - DNA, 25 bp, Probe sequence
gaattttaaagattacacaggcatt

SEQ ID NO: 265012 - DNA, 25 bp, Probe sequence
gaaactaatcaaaaatactaatgta

SEQ ID NO: 265013 - DNA, 25 bp, Probe sequence
gaaattggtgcacatattatagcgc

SEQ ID NO: 265014 - DNA, 25 bp, Probe sequence
gtcggcacaacagtggttgagggta

SEQ ID NO: 265015 - DNA, 25 bp, Probe sequence
gttgcaggtatggaaattggtgcac

SEQ ID NO: 265016 - DNA, 25 bp, Probe sequence
gtccgttattcaggtcaagaagata

SEQ ID NO: 265017 - DNA, 25 bp, Probe sequence
gggtattcaacaaacggctaaagct

SEQ ID NO: 265018 - DNA, 25 bp, Probe sequence
ggtgcacatattatagcgcatccca

SEQ ID NO: 265019 - DNA, 25 bp, Probe sequence
ggttcagctgtatttaacagtaaat

SEQ ID NO: 265020 - DNA, 25 bp, Probe sequence
ggcacaacagtggttgagggtattc

SEQ ID NO: 265021 - DNA, 25 bp, Probe sequence
ggaaaagtgctgtcagttaaaggca

SEQ ID NO: 265022 - DNA, 25 bp, Probe sequence
ggaagataaagctgttcatccaaaa

SEQ ID NO: 265023 - DNA, 25 bp, Probe sequence
tggcgtcggcacaacagtggttgag

SEQ ID NO: 265024 - DNA, 25 bp, Probe sequence
tgagggtattcaacaaacggctaaa

SEQ ID NO: 265025 - DNA, 25 bp, Probe sequence
tgcacatattatagcgcatcccaat

SEQ ID NO: 265026 - DNA, 25 bp, Probe sequence
tattcaggtcaagaagatattgcca

SEQ ID NO: 265027 - DNA, 25 bp, Probe sequence
ttatagcgcatcccaatggtgaata

SEQ ID NO: 265028 - DNA, 25 bp, Probe sequence
ttgtccgttattcaggtcaagaaga

SEQ ID NO: 265029 - DNA, 25 bp, Probe sequence
attggtgtaatctatgcaggtaata

SEQ ID NO: 265030 - DNA, 25 bp, Probe sequence
atcggatgcaataatccagcctggt

SEQ ID NO: 265031 - DNA, 25 bp, Probe sequence
atctatgcaggtaataagccatcag

SEQ ID NO: 265032 - DNA, 25 bp, Probe sequence
atgcaataatccagcctggtagctc

SEQ ID NO: 265033 - DNA, 25 bp, Probe sequence
agtacgaagctattggtgtaatcta

SEQ ID NO: 265034 - DNA, 25 bp, Probe sequence
actaataaacatgttacctatcaca

SEQ ID NO: 265035 - DNA, 25 bp, Probe sequence
acaagagcattcgctgtttatttct

SEQ ID NO: 265036 - DNA, 25 bp, Probe sequence
aagcacaagagcattcgctgtttat

SEQ ID NO: 265037 - DNA, 25 bp, Probe sequence
aagagcattcgctgtttatttctct

SEQ ID NO: 265038 - DNA, 25 bp, Probe sequence
aatccagcctggtagctctggatca

SEQ ID NO: 265039 - DNA, 25 bp, Probe sequence
aataatccagcctggtagctctgga

SEQ ID NO: 265040 - DNA, 25 bp, Probe sequence
aatcatacaatcattactaataaac

SEQ ID NO: 265041 - DNA, 25 bp, Probe sequence
ctggtagctctggatcacctatatt

SEQ ID NO: 265042 - DNA, 25 bp, Probe sequence
gctattggtgtaatctatgcaggta

SEQ ID NO: 265043 - DNA, 25 bp, Probe sequence
gcacaagagcattcgctgtttattt

SEQ ID NO: 265044 - DNA, 25 bp, Probe sequence
gcaataatccagcctggtagctctg

SEQ ID NO: 265045 - DNA, 25 bp, Probe sequence
gaagatattgcggttgtgcaagttg

SEQ ID NO: 265046 - DNA, 25 bp, Probe sequence
gaagctattggtgtaatctatgcag

SEQ ID NO: 265047 - DNA, 25 bp, Probe sequence
gaaagcacaagagcattcgctgttt

SEQ ID NO: 265048 - DNA, 25 bp, Probe sequence
gatattgcggttgtgcaagttgaag

SEQ ID NO: 265049 - DNA, 25 bp, Probe sequence
gttggaaatcatacaatcattacta

SEQ ID NO: 265050 - DNA, 25 bp, Probe sequence
gtaataagccatcaggtgaaagcac

SEQ ID NO: 265051 - DNA, 25 bp, Probe sequence
gtcatcggatgcaataatccagcct

SEQ ID NO: 265052 - DNA, 25 bp, Probe sequence
gtgaatgggaatatagtgtcatcgg

SEQ ID NO: 265053 - DNA, 25 bp, Probe sequence
gtgtaatctatgcaggtaataagcc

SEQ ID NO: 265054 - DNA, 25 bp, Probe sequence
gtgtcatcggatgcaataatccagc

SEQ ID NO: 265055 - DNA, 25 bp, Probe sequence
gggaatatagtgtcatcggatgcaa

SEQ ID NO: 265056 - DNA, 25 bp, Probe sequence
ggatgcaataatccagcctggtagc

SEQ ID NO: 265057 - DNA, 25 bp, Probe sequence
ggaaatcatacaatcattactaata

SEQ ID NO: 265058 - DNA, 25 bp, Probe sequence
tgcaggtaataagccatcaggtgaa

SEQ ID NO: 265059 - DNA, 25 bp, Probe sequence
tgcggttgtgcaagttgaagaaaaa

SEQ ID NO: 265060 - DNA, 25 bp, Probe sequence
tccagcctggtagctctggatcacc

SEQ ID NO: 265061 - DNA, 25 bp, Probe sequence
taagccatcaggtgaaagcacaaga

SEQ ID NO: 265062 - DNA, 25 bp, Probe sequence
tagtaagtacgaagctattggtgta

SEQ ID NO: 265063 - DNA, 25 bp, Probe sequence
attactgcacatccaaatagtgata

SEQ ID NO: 265064 - DNA, 25 bp, Probe sequence
atatttttccatatactggtgtagt

SEQ ID NO: 265065 - DNA, 25 bp, Probe sequence
atactggtgtagttgcttttaaaag

SEQ ID NO: 265066 - DNA, 25 bp, Probe sequence
aggtaatggtggtatttattcgatt

SEQ ID NO: 265067 - DNA, 25 bp, Probe sequence
agcagtattgtatattcagcgcata

SEQ ID NO: 265068 - DNA, 25 bp, Probe sequence
aaagtgattggttatccacacccat

SEQ ID NO: 265069 - DNA, 25 bp, Probe sequence
aacaattttaacatctgtaacaggt

SEQ ID NO: 265070 - DNA, 25 bp, Probe sequence
aactctggatcacctgtattaaaca

SEQ ID NO: 265071 - DNA, 25 bp, Probe sequence
aagctggtgagcgaattaaagtgat

SEQ ID NO: 265072 - DNA, 25 bp, Probe sequence
aagattattaattatccaggtaaag

SEQ ID NO: 265073 - DNA, 25 bp, Probe sequence
cattcaagttgaagagcgtgcaata

SEQ ID NO: 265074 - DNA, 25 bp, Probe sequence
ctggccctgtgatgtcagtagaagg

SEQ ID NO: 265075 - DNA, 25 bp, Probe sequence
ctgccaaagcagaaaataatgtcac

SEQ ID NO: 265076 - DNA, 25 bp, Probe sequence
gcggaaactctggatcacctgtatt

SEQ ID NO: 265077 - DNA, 25 bp, Probe sequence
gcatatggcgtctactttacaccag

SEQ ID NO: 265078 - DNA, 25 bp, Probe sequence
gaaagcggaaactctggatcacctg

SEQ ID NO: 265079 - DNA, 25 bp, Probe sequence
gaacaaaaacgtagtcatcaagagt

SEQ ID NO: 265080 - DNA, 25 bp, Probe sequence
gaaatgcatatggcgtctactttac

SEQ ID NO: 265081 - DNA, 25 bp, Probe sequence
gagcgtgcaatagaacgtggaccaa

SEQ ID NO: 265082 - DNA, 25 bp, Probe sequence
gatgtatcagtcattcaagttgaag

SEQ ID NO: 265083 - DNA, 25 bp, Probe sequence
gattggttatccacacccatacaaa

SEQ ID NO: 265084 - DNA, 25 bp, Probe sequence
gttttatatgagtcaactggccctg

SEQ ID NO: 265085 - DNA, 25 bp, Probe sequence
gtaacgccattcaaatatgcggcag

SEQ ID NO: 265086 - DNA, 25 bp, Probe sequence
gtcagtagaaggtagcagtattgta

SEQ ID NO: 265087 - DNA, 25 bp, Probe sequence
gtcaactggccctgtgatgtcagta

SEQ ID NO: 265088 - DNA, 25 bp, Probe sequence
ggttatccacacccatacaaaaata

SEQ ID NO: 265089 - DNA, 25 bp, Probe sequence
ggatcacctgtattaaacagcaaca

SEQ ID NO: 265090 - DNA, 25 bp, Probe sequence
ggcaggggctaaagctggtgagcga

SEQ ID NO: 265091 - DNA, 25 bp, Probe sequence
ggcgtctactttacaccagaaatta

SEQ ID NO: 265092 - DNA, 25 bp, Probe sequence
tatgcggcaggggctaaagctggtg

SEQ ID NO: 265093 - DNA, 25 bp, Probe sequence
tatgagtcaactggccctgtgatgt

SEQ ID NO: 265094 - DNA, 25 bp, Probe sequence
tattcagcgcatactgaaagcggaa

SEQ ID NO: 265095 - DNA, 25 bp, Probe sequence
tattcattttgcttctgatgtaaaa

SEQ ID NO: 265096 - DNA, 25 bp, Probe sequence
ttaaaagtgcaactggatttgtagt

SEQ ID NO: 265097 - DNA, 25 bp, Probe sequence
attgtgacatgcatacacaacctaa

SEQ ID NO: 265098 - DNA, 25 bp, Probe sequence
atagcaacaacgaactagtaggtat

SEQ ID NO: 265099 - DNA, 25 bp, Probe sequence
atgcatacacaacctaaatagcaac

SEQ ID NO: 265100 - DNA, 25 bp, Probe sequence
agggagaattgtgacatgcatacac

SEQ ID NO: 265101 - DNA, 25 bp, Probe sequence
acctaaatagcaacaacgaactagt

SEQ ID NO: 265102 - DNA, 25 bp, Probe sequence
acttcacaccagagattaaaaaatt

SEQ ID NO: 265103 - DNA, 25 bp, Probe sequence
acatgcatacacaacctaaatagca

SEQ ID NO: 265104 - DNA, 25 bp, Probe sequence
acaacgaactagtaggtattcattt

SEQ ID NO: 265105 - DNA, 25 bp, Probe sequence
acaacctaaatagcaacaacgaact

SEQ ID NO: 265106 - DNA, 25 bp, Probe sequence
aacgaactagtaggtattcattttg

SEQ ID NO: 265107 - DNA, 25 bp, Probe sequence
cattttgcttcagatgtgaaagatg

SEQ ID NO: 265108 - DNA, 25 bp, Probe sequence
ctacttcacaccagagattaaaaaa

SEQ ID NO: 265109 - DNA, 25 bp, Probe sequence
cgaactagtaggtattcattttgct

SEQ ID NO: 265110 - DNA, 25 bp, Probe sequence
cgtctacttcacaccagagattaaa

SEQ ID NO: 265111 - DNA, 25 bp, Probe sequence
gcgtctacttcacaccagagattaa

SEQ ID NO: 265112 - DNA, 25 bp, Probe sequence
gcttcagatgtgaaagatgatgaca

SEQ ID NO: 265113 - DNA, 25 bp, Probe sequence
gcatacacaacctaaatagcaacaa

SEQ ID NO: 265114 - DNA, 25 bp, Probe sequence
gcaacaacgaactagtaggtattca

SEQ ID NO: 265115 - DNA, 25 bp, Probe sequence
gaattgtgacatgcatacacaacct

SEQ ID NO: 265116 - DNA, 25 bp, Probe sequence
gaaatgcttatggcgtctacttcac

SEQ ID NO: 265117 - DNA, 25 bp, Probe sequence
gacaatagaaatgcttatggcgtct

SEQ ID NO: 265118 - DNA, 25 bp, Probe sequence
gacatgcatacacaacctaaatagc

SEQ ID NO: 265119 - DNA, 25 bp, Probe sequence
gatgacaatagaaatgcttatggcg

SEQ ID NO: 265120 - DNA, 25 bp, Probe sequence
gtctacttcacaccagagattaaaa

SEQ ID NO: 265121 - DNA, 25 bp, Probe sequence
gtgacatgcatacacaacctaaata

SEQ ID NO: 265122 - DNA, 25 bp, Probe sequence
gggagaattgtgacatgcatacaca

SEQ ID NO: 265123 - DNA, 25 bp, Probe sequence
tgatagggagaattgtgacatgcat

SEQ ID NO: 265124 - DNA, 25 bp, Probe sequence
tgacatgcatacacaacctaaatag

SEQ ID NO: 265125 - DNA, 25 bp, Probe sequence
tgacaatagaaatgcttatggcgtc

SEQ ID NO: 265126 - DNA, 25 bp, Probe sequence
tctacttcacaccagagattaaaaa

SEQ ID NO: 265127 - DNA, 25 bp, Probe sequence
tacacaacctaaatagcaacaacga

SEQ ID NO: 265128 - DNA, 25 bp, Probe sequence
tagggagaattgtgacatgcataca

SEQ ID NO: 265129 - DNA, 25 bp, Probe sequence
tattcattttgcttcagatgtgaaa

SEQ ID NO: 265130 - DNA, 25 bp, Probe sequence
ttcattttgcttcagatgtgaaaga

SEQ ID NO: 265131 - DNA, 25 bp, Probe sequence
attcaggatccccagtgtttaattc

SEQ ID NO: 265132 - DNA, 25 bp, Probe sequence
attgcaattgcatatgctgtcgatg

SEQ ID NO: 265133 - DNA, 25 bp, Probe sequence
atttagtttatttcacacccgagat

SEQ ID NO: 265134 - DNA, 25 bp, Probe sequence
atatttagtttatttcacacccgag

SEQ ID NO: 265135 - DNA, 25 bp, Probe sequence
atatgctgtcgatgtcaaaaatgat

SEQ ID NO: 265136 - DNA, 25 bp, Probe sequence
atcatgaggtcattgcaattgcata

SEQ ID NO: 265137 - DNA, 25 bp, Probe sequence
atcatatttagtttatttcacaccc

SEQ ID NO: 265138 - DNA, 25 bp, Probe sequence
atccccagtgtttaattcaaatcat

SEQ ID NO: 265139 - DNA, 25 bp, Probe sequence
atccatcgatggtaatcaaatgact

SEQ ID NO: 265140 - DNA, 25 bp, Probe sequence
agtttatttcacacccgagatcaag

SEQ ID NO: 265141 - DNA, 25 bp, Probe sequence
acccgagatcaagaaattcattgca

SEQ ID NO: 265142 - DNA, 25 bp, Probe sequence
caattcaggatccccagtgtttaat

SEQ ID NO: 265143 - DNA, 25 bp, Probe sequence
aattgcatatgctgtcgatgtcaaa

SEQ ID NO: 265144 - DNA, 25 bp, Probe sequence
caggatccccagtgtttaattcaaa

SEQ ID NO: 265145 - DNA, 25 bp, Probe sequence
cccagtgtttaattcaaatcatgag

SEQ ID NO: 265146 - DNA, 25 bp, Probe sequence
gcaattgcatatgctgtcgatgtca

SEQ ID NO: 265147 - DNA, 25 bp, Probe sequence
gcaattcaggatccccagtgtttaa

SEQ ID NO: 265148 - DNA, 25 bp, Probe sequence
gaggtcattgcaattgcatatgctg

SEQ ID NO: 265149 - DNA, 25 bp, Probe sequence
gatattatccatcgatggtaatcaa

SEQ ID NO: 265150 - DNA, 25 bp, Probe sequence
gtttatttcacacccgagatcaaga

SEQ ID NO: 265151 - DNA, 25 bp, Probe sequence
gtcgatgtcaaaaatgatgcaacaa

SEQ ID NO: 265152 - DNA, 25 bp, Probe sequence
ggtcattgcaattgcatatgctgtc

SEQ ID NO: 265153 - DNA, 25 bp, Probe sequence
ggtaatcaaatgacttcagatgcat

SEQ ID NO: 265154 - DNA, 25 bp, Probe sequence
ggatccccagtgtttaattcaaatc

SEQ ID NO: 265155 - DNA, 25 bp, Probe sequence
ggaaagatattatccatcgatggta

SEQ ID NO: 265156 - DNA, 25 bp, Probe sequence
tggcaattcaggatccccagtgttt

SEQ ID NO: 265157 - DNA, 25 bp, Probe sequence
tcaggatccccagtgtttaattcaa

SEQ ID NO: 265158 - DNA, 25 bp, Probe sequence
tcaaatgacttcagatgcatttgct

SEQ ID NO: 265159 - DNA, 25 bp, Probe sequence
tcacacccgagatcaagaaattcat

SEQ ID NO: 265160 - DNA, 25 bp, Probe sequence
tttatttcacacccgagatcaagaa

SEQ ID NO: 265161 - DNA, 25 bp, Probe sequence
ttagtttatttcacacccgagatca

SEQ ID NO: 265162 - DNA, 25 bp, Probe sequence
ttcaggatccccagtgtttaattca

SEQ ID NO: 265163 - DNA, 25 bp, Probe sequence
ttaattcaaatcatgaggtcattgc

SEQ ID NO: 265164 - DNA, 25 bp, Probe sequence
ttgcatatgctgtcgatgtcaaaaa

SEQ ID NO: 265165 - DNA, 25 bp, Probe sequence
attccatacgcaggatctgaagatt

SEQ ID NO: 265166 - DNA, 25 bp, Probe sequence
ataagcatgtattacctggtgttca

SEQ ID NO: 265167 - DNA, 25 bp, Probe sequence
atcattccatacgcaggatctgaag

SEQ ID NO: 265168 - DNA, 25 bp, Probe sequence
atgataccggtggatactataaagt

SEQ ID NO: 265169 - DNA, 25 bp, Probe sequence
agaattggatcagctacaggatttg

SEQ ID NO: 265170 - DNA, 25 bp, Probe sequence
agctacaggatttgtggtaggaaaa

SEQ ID NO: 265171 - DNA, 25 bp, Probe sequence
agccgaacataatgtgaagcaagta

SEQ ID NO: 265172 - DNA, 25 bp, Probe sequence
acctggtgttcaagttggtagcaca

SEQ ID NO: 265173 - DNA, 25 bp, Probe sequence
acaattcttgctcatccaaatggcg

SEQ ID NO: 265174 - DNA, 25 bp, Probe sequence
aaatcattccatacgcaggatctga

SEQ ID NO: 265175 - DNA, 25 bp, Probe sequence
aacacaaatatttctccgtataaag

SEQ ID NO: 265176 - DNA, 25 bp, Probe sequence
aagcatgtattacctggtgttcaag

SEQ ID NO: 265177 - DNA, 25 bp, Probe sequence
aattcttgctcatccaaatggcgaa

SEQ ID NO: 265178 - DNA, 25 bp, Probe sequence
caaaacacaaatatttctccgtata

SEQ ID NO: 265179 - DNA, 25 bp, Probe sequence
gcgtcggcacaaccattgttgaagg

SEQ ID NO: 265180 - DNA, 25 bp, Probe sequence
gcatgtattacctggtgttcaagtt

SEQ ID NO: 265181 - DNA, 25 bp, Probe sequence
gcacaattcttgctcatccaaatgg

SEQ ID NO: 265182 - DNA, 25 bp, Probe sequence
gcacaaccattgttgaaggtattca

SEQ ID NO: 265183 - DNA, 25 bp, Probe sequence
gaattgttagaattggatcagctac

SEQ ID NO: 265184 - DNA, 25 bp, Probe sequence
gaaaatgataccggtggatactata

SEQ ID NO: 265185 - DNA, 25 bp, Probe sequence
gataccggtggatactataaagtaa

SEQ ID NO: 265186 - DNA, 25 bp, Probe sequence
gttggtagcacaattcttgctcatc

SEQ ID NO: 265187 - DNA, 25 bp, Probe sequence
gtaaaaaaatcattccatacgcagg

SEQ ID NO: 265188 - DNA, 25 bp, Probe sequence
gtagcacaattcttgctcatccaaa

SEQ ID NO: 265189 - DNA, 25 bp, Probe sequence
gtacaaaacacaaatatttctccgt

SEQ ID NO: 265190 - DNA, 25 bp, Probe sequence
gtcggcacaaccattgttgaaggta

SEQ ID NO: 265191 - DNA, 25 bp, Probe sequence
ggtgttcaagttggtagcacaattc

SEQ ID NO: 265192 - DNA, 25 bp, Probe sequence
ggtagcacaattcttgctcatccaa

SEQ ID NO: 265193 - DNA, 25 bp, Probe sequence
tggcgaaaatgataccggtggatac

SEQ ID NO: 265194 - DNA, 25 bp, Probe sequence
ggcgtcggcacaaccattgttgaag

SEQ ID NO: 265195 - DNA, 25 bp, Probe sequence
tggcgtcggcacaaccattgttgaa

SEQ ID NO: 265196 - DNA, 25 bp, Probe sequence
tggtagcacaattcttgctcatcca

SEQ ID NO: 265197 - DNA, 25 bp, Probe sequence
tgtattacctggtgttcaagttggt

SEQ ID NO: 265198 - DNA, 25 bp, Probe sequence
tatttctccgtataaaggaattgtt

SEQ ID NO: 265199 - DNA, 25 bp, Probe sequence
agtaggtagtacagtgcttgcccat

SEQ ID NO: 265200 - DNA, 25 bp, Probe sequence
atacagcgtatatttaacgcctgaa

SEQ ID NO: 265201 - DNA, 25 bp, Probe sequence
atcaatcaacaggaacagtactatc

SEQ ID NO: 265202 - DNA, 25 bp, Probe sequence
aggcatactaagagtaggcgcagct

SEQ ID NO: 265203 - DNA, 25 bp, Probe sequence
aggtggcaattcagggtcaccggtc

SEQ ID NO: 265204 - DNA, 25 bp, Probe sequence
agagtaggcgcagctacaggatttg

SEQ ID NO: 265205 - DNA, 25 bp, Probe sequence
actgaaatcctaacgttggcatcgg

SEQ ID NO: 265206 - DNA, 25 bp, Probe sequence
aaaagttatcccatatgcaggctcg

SEQ ID NO: 265207 - DNA, 25 bp, Probe sequence
aacgttggcatcggaagctaaagcg

SEQ ID NO: 265208 - DNA, 25 bp, Probe sequence
aatgaagttgtgggcgttttatata

SEQ ID NO: 265209 - DNA, 25 bp, Probe sequence
aatcctaacgttggcatcggaagct

SEQ ID NO: 265210 - DNA, 25 bp, Probe sequence
aatcgttggctatccagcgccatat

SEQ ID NO: 265211 - DNA, 25 bp, Probe sequence
caaatactagtatttcgccatacaa

SEQ ID NO: 265212 - DNA, 25 bp, Probe sequence
gcaattcagggtcaccggtctttaa

SEQ ID NO: 265213 - DNA, 25 bp, Probe sequence
gcaggctcggcagatttagctatcg

SEQ ID NO: 265214 - DNA, 25 bp, Probe sequence
gaaaatactgaaatcctaacgttgg

SEQ ID NO: 265215 - DNA, 25 bp, Probe sequence
gaaagagttgcaatcgttggctatc

SEQ ID NO: 265216 - DNA, 25 bp, Probe sequence
gacatgtcgttaaagatgtgcaagt

SEQ ID NO: 265217 - DNA, 25 bp, Probe sequence
gaccaaattggtcattctaaaaaag

SEQ ID NO: 265218 - DNA, 25 bp, Probe sequence
gagttgcaatcgttggctatccagc

SEQ ID NO: 265219 - DNA, 25 bp, Probe sequence
gatactggcggatactataaagtca

SEQ ID NO: 265220 - DNA, 25 bp, Probe sequence
gatttagctatcgttgaagttgaag

SEQ ID NO: 265221 - DNA, 25 bp, Probe sequence
gtatttcgccatacaaaggcatact

SEQ ID NO: 265222 - DNA, 25 bp, Probe sequence
gggcgttttatatagtggagaccaa

SEQ ID NO: 265223 - DNA, 25 bp, Probe sequence
ggaacagtactatcaattaatggag

SEQ ID NO: 265224 - DNA, 25 bp, Probe sequence
ggcatcggaagctaaagcgaatgaa

SEQ ID NO: 265225 - DNA, 25 bp, Probe sequence
ggcgaaaatgatactggcggatact

SEQ ID NO: 265226 - DNA, 25 bp, Probe sequence
ggctatccagcgccatataaaaata

SEQ ID NO: 265227 - DNA, 25 bp, Probe sequence
ggctcggcagatttagctatcgttg

SEQ ID NO: 265228 - DNA, 25 bp, Probe sequence
tgaagaagattcagtttacccaaaa

SEQ ID NO: 265229 - DNA, 25 bp, Probe sequence
tcagggtcaccggtctttaacaata

SEQ ID NO: 265230 - DNA, 25 bp, Probe sequence
taaattagtatcagatgcatttgct

SEQ ID NO: 265231 - DNA, 25 bp, Probe sequence
tacagtgcttgcccatccaaatggc

SEQ ID NO: 265232 - DNA, 25 bp, Probe sequence
tatcccatatgcaggctcggcagat

SEQ ID NO: 265233 - DNA, 25 bp, Probe sequence
attgcagtaaatggcacatcaacac

SEQ ID NO: 265234 - DNA, 25 bp, Probe sequence
attagccaactgaatctgctttatg

SEQ ID NO: 265235 - DNA, 25 bp, Probe sequence
attttatcaagcttaacatttaata

SEQ ID NO: 265236 - DNA, 25 bp, Probe sequence
agtactgaagcatgatagaggtatt

SEQ ID NO: 265237 - DNA, 25 bp, Probe sequence
agccaactgaatctgctttatgttc

SEQ ID NO: 265238 - DNA, 25 bp, Probe sequence
acaaacattttatcgaatctttcat

SEQ ID NO: 265239 - DNA, 25 bp, Probe sequence
aaattacacagcaaacttagttcat

SEQ ID NO: 265240 - DNA, 25 bp, Probe sequence
aaactatcaagttccatattcaatt

SEQ ID NO: 265241 - DNA, 25 bp, Probe sequence
aaacaggaactaaagcgaaagcaga

SEQ ID NO: 265242 - DNA, 25 bp, Probe sequence
aatcagacatctttacacctaattt

SEQ ID NO: 265243 - DNA, 25 bp, Probe sequence
caggtatttacacagcgaatttaat

SEQ ID NO: 265244 - DNA, 25 bp, Probe sequence
gcgaaagcggatagctatgtaccat

SEQ ID NO: 265245 - DNA, 25 bp, Probe sequence
gctaagccattagataaatcatcaa

SEQ ID NO: 265246 - DNA, 25 bp, Probe sequence
gctatgtaccatatacaattgcagt

SEQ ID NO: 265247 - DNA, 25 bp, Probe sequence
gaatctgctttatgttcaagatatt

SEQ ID NO: 265248 - DNA, 25 bp, Probe sequence
gaagcaagcgaaatatacagttaat

SEQ ID NO: 265249 - DNA, 25 bp, Probe sequence
gaaagcagacagatatgtaccatac

SEQ ID NO: 265250 - DNA, 25 bp, Probe sequence
gaaagcttattatactgtttatttt

SEQ ID NO: 265251 - DNA, 25 bp, Probe sequence
gaaatttaagtcattgattacaaca

SEQ ID NO: 265252 - DNA, 25 bp, Probe sequence
gacatctttacacctaatttattta

SEQ ID NO: 265253 - DNA, 25 bp, Probe sequence
gatagaggtatcggggaacgtgaat

SEQ ID NO: 265254 - DNA, 25 bp, Probe sequence
gtgacccacgtgtaggctacaaaga

SEQ ID NO: 265255 - DNA, 25 bp, Probe sequence
gtgatcttgacttaaaatttgcgaa

SEQ ID NO: 265256 - DNA, 25 bp, Probe sequence
ggtacatctacaaacattttatcga

SEQ ID NO: 265257 - DNA, 25 bp, Probe sequence
ggcacatcaacaccaattttatcag

SEQ ID NO: 265258 - DNA, 25 bp, Probe sequence
ggcacatcaacaccaattttatcaa

SEQ ID NO: 265259 - DNA, 25 bp, Probe sequence
tgcagtaaatggcacatcaacacca

SEQ ID NO: 265260 - DNA, 25 bp, Probe sequence
tctgccgcagctaagccattagata

SEQ ID NO: 265261 - DNA, 25 bp, Probe sequence
tcaacaccaattttatcagatttaa

SEQ ID NO: 265262 - DNA, 25 bp, Probe sequence
tacacctaatttatttagtgccaaa

SEQ ID NO: 265263 - DNA, 25 bp, Probe sequence
ttacaggtgacccacgtgtaggcta

SEQ ID NO: 265264 - DNA, 25 bp, Probe sequence
tatgtaccatacacaattgcagtaa

SEQ ID NO: 265265 - DNA, 25 bp, Probe sequence
ttatcgaatctttcattttcaaata

SEQ ID NO: 265266 - DNA, 25 bp, Probe sequence
ttcattttcaaataaaccttggaca

SEQ ID NO: 265267 - DNA, 25 bp, Probe sequence
attacaccatggacattctaacatc

SEQ ID NO: 265268 - DNA, 25 bp, Probe sequence
atcaagtacattacaccatggacat

SEQ ID NO: 265269 - DNA, 25 bp, Probe sequence
atcaggtatctacacagctgactta

SEQ ID NO: 265270 - DNA, 25 bp, Probe sequence
agtgaacggcacaagccaaaacatt

SEQ ID NO: 265271 - DNA, 25 bp, Probe sequence
agtacattacaccatggacattcta

SEQ ID NO: 265272 - DNA, 25 bp, Probe sequence
accatggacattctaacatccagat

SEQ ID NO: 265273 - DNA, 25 bp, Probe sequence
acattacaccatggacattctaaca

SEQ ID NO: 265274 - DNA, 25 bp, Probe sequence
acaccatggacattctaacatccag

SEQ ID NO: 265275 - DNA, 25 bp, Probe sequence
acaatcacagtgaacggcacaagcc

SEQ ID NO: 265276 - DNA, 25 bp, Probe sequence
aaatcaggtatctacacagctgact

SEQ ID NO: 265277 - DNA, 25 bp, Probe sequence
aagcaagcggaatatacggttcatt

SEQ ID NO: 265278 - DNA, 25 bp, Probe sequence
aagactttcaaagcaagcggaatat

SEQ ID NO: 265279 - DNA, 25 bp, Probe sequence
aagtgacattaaagctatcagtgtt

SEQ ID NO: 265280 - DNA, 25 bp, Probe sequence
aatcacagtgaacggcacaagccaa

SEQ ID NO: 265281 - DNA, 25 bp, Probe sequence
caagtacattacaccatggacattc

SEQ ID NO: 265282 - DNA, 25 bp, Probe sequence
caagtgccatatacaatcacagtga

SEQ ID NO: 265283 - DNA, 25 bp, Probe sequence
cacagtgaacggcacaagccaaaac

SEQ ID NO: 265284 - DNA, 25 bp, Probe sequence
caagcggaatatacggttcatttta

SEQ ID NO: 265285 - DNA, 25 bp, Probe sequence
cattctaacatccagattccatata

SEQ ID NO: 265286 - DNA, 25 bp, Probe sequence
gcaacctaaagataaagctaaagca

SEQ ID NO: 265287 - DNA, 25 bp, Probe sequence
gcaagcggaatatacggttcatttt

SEQ ID NO: 265288 - DNA, 25 bp, Probe sequence
gaatatacggttcattttaaaaatg

SEQ ID NO: 265289 - DNA, 25 bp, Probe sequence
gacattaaagctatcagtgttaacg

SEQ ID NO: 265290 - DNA, 25 bp, Probe sequence
gacattctaacatccagattccata

SEQ ID NO: 265291 - DNA, 25 bp, Probe sequence
gatgttgatttaagactttcgaagc

SEQ ID NO: 265292 - DNA, 25 bp, Probe sequence
gatactaaaaagcaacctaaagata

SEQ ID NO: 265293 - DNA, 25 bp, Probe sequence
gttcaagtgccatatacaatcacag

SEQ ID NO: 265294 - DNA, 25 bp, Probe sequence
gtacattacaccatggacattctaa

SEQ ID NO: 265295 - DNA, 25 bp, Probe sequence
ggacattctaacatccagattccat

SEQ ID NO: 265296 - DNA, 25 bp, Probe sequence
tgccatatacaatcacagtgaacgg

SEQ ID NO: 265297 - DNA, 25 bp, Probe sequence
tcgatttgaaatcaggtatctacac

SEQ ID NO: 265298 - DNA, 25 bp, Probe sequence
tcaggtatctacacagctgacttaa

SEQ ID NO: 265299 - DNA, 25 bp, Probe sequence
taaagctatcagtgttaacgtagat

SEQ ID NO: 265300 - DNA, 25 bp, Probe sequence
ttctaacatccagattccatataca

SEQ ID NO: 265301 - DNA, 25 bp, Probe sequence
atttgtgttctataatgcaagcaaa

SEQ ID NO: 265302 - DNA, 25 bp, Probe sequence
atatgtagacttaaaaactgagtat

SEQ ID NO: 265303 - DNA, 25 bp, Probe sequence
atctaataatgtgaaattcccagta

SEQ ID NO: 265304 - DNA, 25 bp, Probe sequence
ataatgtgaaattcccagtaacaat

SEQ ID NO: 265305 - DNA, 25 bp, Probe sequence
atgaatttgtgttctataatgcaag

SEQ ID NO: 265306 - DNA, 25 bp, Probe sequence
atggttcgtcaaaatatgtagactt

SEQ ID NO: 265307 - DNA, 25 bp, Probe sequence
acttgctgaacgcgcagtgtataaa

SEQ ID NO: 265308 - DNA, 25 bp, Probe sequence
aaatgaatttgtgttctataatgca

SEQ ID NO: 265309 - DNA, 25 bp, Probe sequence
aaaaatggttcgtcaaaatatgtag

SEQ ID NO: 265310 - DNA, 25 bp, Probe sequence
aaaatggttcgtcaaaatatgtaga

SEQ ID NO: 265311 - DNA, 25 bp, Probe sequence
aactgacattaaaaaggtagatatt

SEQ ID NO: 265312 - DNA, 25 bp, Probe sequence
aaggtagatattgaacttaaattct

SEQ ID NO: 265313 - DNA, 25 bp, Probe sequence
aatgtgaaattcccagtaacaataa

SEQ ID NO: 265314 - DNA, 25 bp, Probe sequence
aatctaataatgtgaaattcccagt

SEQ ID NO: 265315 - DNA, 25 bp, Probe sequence
aataatgtgaaattcccagtaacaa

SEQ ID NO: 265316 - DNA, 25 bp, Probe sequence
aatttgtgttctataatgcaagcaa

SEQ ID NO: 265317 - DNA, 25 bp, Probe sequence
caagggataactaaacatgacatag

SEQ ID NO: 265318 - DNA, 25 bp, Probe sequence
cttgctgaacgcgcagtgtataaag

SEQ ID NO: 265319 - DNA, 25 bp, Probe sequence
ctaataatgtgaaattcccagtaac

SEQ ID NO: 265320 - DNA, 25 bp, Probe sequence
gcaaatgatcaagggataactaaac

SEQ ID NO: 265321 - DNA, 25 bp, Probe sequence
gcaagcaaaattacaattaatgatt

SEQ ID NO: 265322 - DNA, 25 bp, Probe sequence
gaatttgtgttctataatgcaagca

SEQ ID NO: 265323 - DNA, 25 bp, Probe sequence
gatcaagggataactaaacatgaca

SEQ ID NO: 265324 - DNA, 25 bp, Probe sequence
gtgaaattcccagtaacaataaata

SEQ ID NO: 265325 - DNA, 25 bp, Probe sequence
ggtagatattgaacttaaattctaa

SEQ ID NO: 265326 - DNA, 25 bp, Probe sequence
ggttcgtcaaaatatgtagacttaa

SEQ ID NO: 265327 - DNA, 25 bp, Probe sequence
tgtgaaattcccagtaacaataaat

SEQ ID NO: 265328 - DNA, 25 bp, Probe sequence
tgtgttctataatgcaagcaaaatt

SEQ ID NO: 265329 - DNA, 25 bp, Probe sequence
tgaaattcccagtaacaataaataa

SEQ ID NO: 265330 - DNA, 25 bp, Probe sequence
tgaacgcgcagtgtataaagtgtat

SEQ ID NO: 265331 - DNA, 25 bp, Probe sequence
taataatgtgaaattcccagtaaca

SEQ ID NO: 265332 - DNA, 25 bp, Probe sequence
taatgtgaaattcccagtaacaata

SEQ ID NO: 265333 - DNA, 25 bp, Probe sequence
ttgctgaacgcgcagtgtataaagt

SEQ ID NO: 265334 - DNA, 25 bp, Probe sequence
ttgtgttctataatgcaagcaaaat

SEQ ID NO: 265335 - DNA, 25 bp, Probe sequence
atttatttagtgccaaagatattaa

SEQ ID NO: 265336 - DNA, 25 bp, Probe sequence
atcagacatctttacacctaattta

SEQ ID NO: 265337 - DNA, 25 bp, Probe sequence
atggcacatcaacaccaattttatc

SEQ ID NO: 265338 - DNA, 25 bp, Probe sequence
agtaaatggcacatcaacaccaatt

SEQ ID NO: 265339 - DNA, 25 bp, Probe sequence
agacatctttacacctaatttattt

SEQ ID NO: 265340 - DNA, 25 bp, Probe sequence
acatctttacacctaatttatttag

SEQ ID NO: 265341 - DNA, 25 bp, Probe sequence
acacctaatttatttagtgccaaag

SEQ ID NO: 265342 - DNA, 25 bp, Probe sequence
aaatcagacatctttacacctaatt

SEQ ID NO: 265343 - DNA, 25 bp, Probe sequence
aaatggcacatcaacaccaatttta

SEQ ID NO: 265344 - DNA, 25 bp, Probe sequence
aaaatcagacatctttacacctaat

SEQ ID NO: 265345 - DNA, 25 bp, Probe sequence
aatggcacatcaacaccaattttat

SEQ ID NO: 265346 - DNA, 25 bp, Probe sequence
aatcagacatctttacacctaattt

SEQ ID NO: 265347 - DNA, 25 bp, Probe sequence
cacctaatttatttagtgccaaaga

SEQ ID NO: 265348 - DNA, 25 bp, Probe sequence
cagacatctttacacctaatttatt

SEQ ID NO: 265349 - DNA, 25 bp, Probe sequence
cagtaaatggcacatcaacaccaat

SEQ ID NO: 265350 - DNA, 25 bp, Probe sequence
catctttacacctaatttatttagt

SEQ ID NO: 265351 - DNA, 25 bp, Probe sequence
gcgaaacaagcaaaatatacagtat

SEQ ID NO: 265352 - DNA, 25 bp, Probe sequence
gcagtaaatggcacatcaacaccaa

SEQ ID NO: 265353 - DNA, 25 bp, Probe sequence
gcacatcaacaccaattttatcaaa

SEQ ID NO: 265354 - DNA, 25 bp, Probe sequence
gacaaagtgaaatctgtattaaaaa

SEQ ID NO: 265355 - DNA, 25 bp, Probe sequence
gacatctttacacctaatttattta

SEQ ID NO: 265356 - DNA, 25 bp, Probe sequence
gtagtgaatttaaaatcagacatct

SEQ ID NO: 265357 - DNA, 25 bp, Probe sequence
gtaaatggcacatcaacaccaattt

SEQ ID NO: 265358 - DNA, 25 bp, Probe sequence
ggcacatcaacaccaattttatcaa

SEQ ID NO: 265359 - DNA, 25 bp, Probe sequence
tggcacatcaacaccaattttatca

SEQ ID NO: 265360 - DNA, 25 bp, Probe sequence
tctttacacctaatttatttagtgc

SEQ ID NO: 265361 - DNA, 25 bp, Probe sequence
tcagacatctttacacctaatttat

SEQ ID NO: 265362 - DNA, 25 bp, Probe sequence
taatttatttagtgccaaagatatt

SEQ ID NO: 265363 - DNA, 25 bp, Probe sequence
taaaatcagacatctttacacctaa

SEQ ID NO: 265364 - DNA, 25 bp, Probe sequence
taaatggcacatcaacaccaatttt

SEQ ID NO: 265365 - DNA, 25 bp, Probe sequence
tacacctaatttatttagtgccaaa

SEQ ID NO: 265366 - DNA, 25 bp, Probe sequence
tttacacctaatttatttagtgcca

SEQ ID NO: 265367 - DNA, 25 bp, Probe sequence
ttacacctaatttatttagtgccaa

SEQ ID NO: 265368 - DNA, 25 bp, Probe sequence
ttaaaatcagacatctttacaccta

SEQ ID NO: 265369 - DNA, 25 bp, Probe sequence
atatttgcattgtgtgttcaataaa

SEQ ID NO: 265370 - DNA, 25 bp, Probe sequence
atcagagatatcattaattacattt

SEQ ID NO: 265371 - DNA, 25 bp, Probe sequence
atggtaaagaggctgtgtctcgatt

SEQ ID NO: 265372 - DNA, 25 bp, Probe sequence
agtgaaggcaatacttttttttctg

SEQ ID NO: 265373 - DNA, 25 bp, Probe sequence
accaatatggtaaagaggctgtgtc

SEQ ID NO: 265374 - DNA, 25 bp, Probe sequence
actaatttatatattgggcaatctt

SEQ ID NO: 265375 - DNA, 25 bp, Probe sequence
aaaaccatatttgcattgtgtgttc

SEQ ID NO: 265376 - DNA, 25 bp, Probe sequence
aacaacatgtgaatgaggagtttaa

SEQ ID NO: 265377 - DNA, 25 bp, Probe sequence
aagaattttagagcaaagtatacct

SEQ ID NO: 265378 - DNA, 25 bp, Probe sequence
aaccatatttgcattgtgtgttcaa

SEQ ID NO: 265379 - DNA, 25 bp, Probe sequence
aagaggctgtgtctcgattaaaaag

SEQ ID NO: 265380 - DNA, 25 bp, Probe sequence
aatgatggtattattatttatttaa

SEQ ID NO: 265381 - DNA, 25 bp, Probe sequence
gcaatcttttggtacagagggtaat

SEQ ID NO: 265382 - DNA, 25 bp, Probe sequence
gaaggcaatacttttttttctgcaa

SEQ ID NO: 265383 - DNA, 25 bp, Probe sequence
gaaagactgtcttaatattttacaa

SEQ ID NO: 265384 - DNA, 25 bp, Probe sequence
gaaattatgacttatcagccagaaa

SEQ ID NO: 265385 - DNA, 25 bp, Probe sequence
gagcaaagtatacctaataaagaat

SEQ ID NO: 265386 - DNA, 25 bp, Probe sequence
gagatatcattaattacatttttta

SEQ ID NO: 265387 - DNA, 25 bp, Probe sequence
gagtttaattctttatcttcttcga

SEQ ID NO: 265388 - DNA, 25 bp, Probe sequence
gagggtaatagaaatgtcattgata

SEQ ID NO: 265389 - DNA, 25 bp, Probe sequence
gaggagtttaattctttatcttctt

SEQ ID NO: 265390 - DNA, 25 bp, Probe sequence
gatacagcctgacaatatttatatt

SEQ ID NO: 265391 - DNA, 25 bp, Probe sequence
gtaaagaggctgtgtctcgattaaa

SEQ ID NO: 265392 - DNA, 25 bp, Probe sequence
gggaaaggtcatgaaaaattacaag

SEQ ID NO: 265393 - DNA, 25 bp, Probe sequence
ggctgtgtctcgattaaaaagaatt

SEQ ID NO: 265394 - DNA, 25 bp, Probe sequence
tgggcaatcttttggtacagagggt

SEQ ID NO: 265395 - DNA, 25 bp, Probe sequence
taattctttatcttcttcgaaaata

SEQ ID NO: 265396 - DNA, 25 bp, Probe sequence
tacttttttttctgcaaaaccatat

SEQ ID NO: 265397 - DNA, 25 bp, Probe sequence
taaggatgttaattatcaactgata

SEQ ID NO: 265398 - DNA, 25 bp, Probe sequence
tacattttttaaaccagaatataat

SEQ ID NO: 265399 - DNA, 25 bp, Probe sequence
tatgacttatcagccagaaaataga

SEQ ID NO: 265400 - DNA, 25 bp, Probe sequence
tatattgggcaatcttttggtacag

SEQ ID NO: 265401 - DNA, 25 bp, Probe sequence
tattttacaagatacagcctgacaa

SEQ ID NO: 265402 - DNA, 25 bp, Probe sequence
tttacaaacagagatgatactacat

SEQ ID NO: 265403 - DNA, 25 bp, Probe sequence
attccttcaactatgtagatgaata

SEQ ID NO: 265404 - DNA, 25 bp, Probe sequence
atttatattccttcaactatgtaga

SEQ ID NO: 265405 - DNA, 25 bp, Probe sequence
atatttatattccttcaactatgta

SEQ ID NO: 265406 - DNA, 25 bp, Probe sequence
atctaagctacctttatatttatat

SEQ ID NO: 265407 - DNA, 25 bp, Probe sequence
atggttacaatattgaggtatactt

SEQ ID NO: 265408 - DNA, 25 bp, Probe sequence
acttaagtggtgaattggagaaaat

SEQ ID NO: 265409 - DNA, 25 bp, Probe sequence
aaatctaagctacctttatatttat

SEQ ID NO: 265410 - DNA, 25 bp, Probe sequence
aaagattgtatatttgacatttcaa

SEQ ID NO: 265411 - DNA, 25 bp, Probe sequence
aaaatcgaatcatcagaatatagag

SEQ ID NO: 265412 - DNA, 25 bp, Probe sequence
aagctacctttatatttatattcct

SEQ ID NO: 265413 - DNA, 25 bp, Probe sequence
aatattgaggtatacttaagtggtg

SEQ ID NO: 265414 - DNA, 25 bp, Probe sequence
caagtttgatgtagagtatggtttt

SEQ ID NO: 265415 - DNA, 25 bp, Probe sequence
ctaagctacctttatatttatattc

SEQ ID NO: 265416 - DNA, 25 bp, Probe sequence
cctttatatttatattccttcaact

SEQ ID NO: 265417 - DNA, 25 bp, Probe sequence
gctacctttatatttatattccttc

SEQ ID NO: 265418 - DNA, 25 bp, Probe sequence
gaatatacaatgaaattacttgata

SEQ ID NO: 265419 - DNA, 25 bp, Probe sequence
gaatcatcagaatatagagagagct

SEQ ID NO: 265420 - DNA, 25 bp, Probe sequence
gaaattgttttttcttctaactatg

SEQ ID NO: 265421 - DNA, 25 bp, Probe sequence
gacatttcaaagtatatacatgaga

SEQ ID NO: 265422 - DNA, 25 bp, Probe sequence
gagcttagatagttttaatgaaatt

SEQ ID NO: 265423 - DNA, 25 bp, Probe sequence
gagagagcttagatagttttaatga

SEQ ID NO: 265424 - DNA, 25 bp, Probe sequence
gatgtagagtatggtttttatattt

SEQ ID NO: 265425 - DNA, 25 bp, Probe sequence
gtttgatgtagagtatggtttttat

SEQ ID NO: 265426 - DNA, 25 bp, Probe sequence
gtatacttaagtggtgaattggaga

SEQ ID NO: 265427 - DNA, 25 bp, Probe sequence
tgtaaaacatttattcgaaaacaag

SEQ ID NO: 265428 - DNA, 25 bp, Probe sequence
tcaatacaaaaatcgaatcatcaga

SEQ ID NO: 265429 - DNA, 25 bp, Probe sequence
taagagatgatgatttgaagtataa

SEQ ID NO: 265430 - DNA, 25 bp, Probe sequence
taaaatctaagctacctttatattt

SEQ ID NO: 265431 - DNA, 25 bp, Probe sequence
tacctttatatttatattccttcaa

SEQ ID NO: 265432 - DNA, 25 bp, Probe sequence
tagagtatggtttttatattttatt

SEQ ID NO: 265433 - DNA, 25 bp, Probe sequence
tatattccttcaactatgtagatga

SEQ ID NO: 265434 - DNA, 25 bp, Probe sequence
ttatattccttcaactatgtagatg

SEQ ID NO: 265435 - DNA, 25 bp, Probe sequence
ttatatttatattccttcaactatg

SEQ ID NO: 265436 - DNA, 25 bp, Probe sequence
ttcttaaaatctaagctacctttat

SEQ ID NO: 265437 - DNA, 25 bp, Probe sequence
attactctgaagtttataaatatag

SEQ ID NO: 265438 - DNA, 25 bp, Probe sequence
atatctgatgattgtagtatgtact

SEQ ID NO: 265439 - DNA, 25 bp, Probe sequence
atagaaagtttaatatcctcgtatg

SEQ ID NO: 265440 - DNA, 25 bp, Probe sequence
atctgatgattgtagtatgtactca

SEQ ID NO: 265441 - DNA, 25 bp, Probe sequence
atgattgtagtatgtactcaaaagt

SEQ ID NO: 265442 - DNA, 25 bp, Probe sequence
agtatattactctgaagtttataaa

SEQ ID NO: 265443 - DNA, 25 bp, Probe sequence
agtttaatatcctcgtatgataaaa

SEQ ID NO: 265444 - DNA, 25 bp, Probe sequence
agtatgtactcaaaagtatttgaac

SEQ ID NO: 265445 - DNA, 25 bp, Probe sequence
agaaagtttaatatcctcgtatgat

SEQ ID NO: 265446 - DNA, 25 bp, Probe sequence
aaatgttcaaaaattgttaattcat

SEQ ID NO: 265447 - DNA, 25 bp, Probe sequence
aaagtatattactctgaagtttata

SEQ ID NO: 265448 - DNA, 25 bp, Probe sequence
aaagtttaatatcctcgtatgataa

SEQ ID NO: 265449 - DNA, 25 bp, Probe sequence
aaacgttgtattggataaagtatat

SEQ ID NO: 265450 - DNA, 25 bp, Probe sequence
aacgttgtattggataaagtatatt

SEQ ID NO: 265451 - DNA, 25 bp, Probe sequence
aagtttaatatcctcgtatgataaa

SEQ ID NO: 265452 - DNA, 25 bp, Probe sequence
aagtatattactctgaagtttataa

SEQ ID NO: 265453 - DNA, 25 bp, Probe sequence
aatgttcaaaaattgttaattcata

SEQ ID NO: 265454 - DNA, 25 bp, Probe sequence
aatagaaagtttaatatcctcgtat

SEQ ID NO: 265455 - DNA, 25 bp, Probe sequence
ctgatgattgtagtatgtactcaaa

SEQ ID NO: 265456 - DNA, 25 bp, Probe sequence
gaaagtttaatatcctcgtatgata

SEQ ID NO: 265457 - DNA, 25 bp, Probe sequence
gatgattgtagtatgtactcaaaag

SEQ ID NO: 265458 - DNA, 25 bp, Probe sequence
gataaagtatattactctgaagttt

SEQ ID NO: 265459 - DNA, 25 bp, Probe sequence
gattgtagtatgtactcaaaagtat

SEQ ID NO: 265460 - DNA, 25 bp, Probe sequence
gtttaatatcctcgtatgataaaaa

SEQ ID NO: 265461 - DNA, 25 bp, Probe sequence
gtatattactctgaagtttataaat

SEQ ID NO: 265462 - DNA, 25 bp, Probe sequence
gtagtatgtactcaaaagtatttga

SEQ ID NO: 265463 - DNA, 25 bp, Probe sequence
ggataaagtatattactctgaagtt

SEQ ID NO: 265464 - DNA, 25 bp, Probe sequence
tgatgattgtagtatgtactcaaaa

SEQ ID NO: 265465 - DNA, 25 bp, Probe sequence
tctgatgattgtagtatgtactcaa

SEQ ID NO: 265466 - DNA, 25 bp, Probe sequence
tactctgaagtttataaatatagtg

SEQ ID NO: 265467 - DNA, 25 bp, Probe sequence
tagaaagtttaatatcctcgtatga

SEQ ID NO: 265468 - DNA, 25 bp, Probe sequence
tatctgatgattgtagtatgtactc

SEQ ID NO: 265469 - DNA, 25 bp, Probe sequence
tatattactctgaagtttataaata

SEQ ID NO: 265470 - DNA, 25 bp, Probe sequence
ttaatatcctcgtatgataaaaaaa

SEQ ID NO: 265471 - DNA, 25 bp, Probe sequence
attatgccaatttaaatggatcgat

SEQ ID NO: 265472 - DNA, 25 bp, Probe sequence
atttatttattgatcctaaaactgt

SEQ ID NO: 265473 - DNA, 25 bp, Probe sequence
atgcaaatacgacagatacttctaa

SEQ ID NO: 265474 - DNA, 25 bp, Probe sequence
atggtactgatgaagttgattttag

SEQ ID NO: 265475 - DNA, 25 bp, Probe sequence
acggctgaactagaaattaatttat

SEQ ID NO: 265476 - DNA, 25 bp, Probe sequence
aaataatgtaaatacgcatggcgta

SEQ ID NO: 265477 - DNA, 25 bp, Probe sequence
aaacgacaagtgtgactgttactgg

SEQ ID NO: 265478 - DNA, 25 bp, Probe sequence
aaaaatggttcagtcgtaatggcga

SEQ ID NO: 265479 - DNA, 25 bp, Probe sequence
aatcaaactataacttcaacactaa

SEQ ID NO: 265480 - DNA, 25 bp, Probe sequence
aataatagattttcgcatgttgcat

SEQ ID NO: 265481 - DNA, 25 bp, Probe sequence
caaataaagtagaacctcatgcagg

SEQ ID NO: 265482 - DNA, 25 bp, Probe sequence
gcgtatcaactgctagaaaagtacc

SEQ ID NO: 265483 - DNA, 25 bp, Probe sequence
gcaggacaacgagcggtactaaaat

SEQ ID NO: 265484 - DNA, 25 bp, Probe sequence
gaatggtttacatcaaggtgactac

SEQ ID NO: 265485 - DNA, 25 bp, Probe sequence
gaacctcatgcaggacaacgagcgg

SEQ ID NO: 265486 - DNA, 25 bp, Probe sequence
gaacacaaatggtaggacatccaga

SEQ ID NO: 265487 - DNA, 25 bp, Probe sequence
gaaactcttacaggtcaatatgata

SEQ ID NO: 265488 - DNA, 25 bp, Probe sequence
gaaattggttctattgaggggcata

SEQ ID NO: 265489 - DNA, 25 bp, Probe sequence
gacatccagagcaactttataagta

SEQ ID NO: 265490 - DNA, 25 bp, Probe sequence
gaggggcataacaatacaaataaag

SEQ ID NO: 265491 - DNA, 25 bp, Probe sequence
gaggatataccttaacttgggataa

SEQ ID NO: 265492 - DNA, 25 bp, Probe sequence
gataaaacttatgttgttcactatg

SEQ ID NO: 265493 - DNA, 25 bp, Probe sequence
gataaggttgatgtaacggctgaac

SEQ ID NO: 265494 - DNA, 25 bp, Probe sequence
gattcatcaactcttgacattgatt

SEQ ID NO: 265495 - DNA, 25 bp, Probe sequence
gttgttcactatgatggagagtatt

SEQ ID NO: 265496 - DNA, 25 bp, Probe sequence
gtaggacatccagagcaactttata

SEQ ID NO: 265497 - DNA, 25 bp, Probe sequence
gtaactactgttgaagaggaatatg

SEQ ID NO: 265498 - DNA, 25 bp, Probe sequence
gtaatggcgacaggtgaagttttag

SEQ ID NO: 265499 - DNA, 25 bp, Probe sequence
gtgtgactgttactggaactttaat

SEQ ID NO: 265500 - DNA, 25 bp, Probe sequence
ggtgactactttgactttactttat

SEQ ID NO: 265501 - DNA, 25 bp, Probe sequence
ggtggaggtggatatgttgatggat

SEQ ID NO: 265502 - DNA, 25 bp, Probe sequence
ggaatatgattcatcaactcttgac

SEQ ID NO: 265503 - DNA, 25 bp, Probe sequence
tggatcgattgagacatttaataaa

SEQ ID NO: 265504 - DNA, 25 bp, Probe sequence
tcgcatgttgcatttattaaaccta

SEQ ID NO: 265505 - DNA, 25 bp, Probe sequence
agtgacgtttcagaagttaaaggca

SEQ ID NO: 265506 - DNA, 25 bp, Probe sequence
aggaagctagtgacgtttcagaagt

SEQ ID NO: 265507 - DNA, 25 bp, Probe sequence
aggttacacaaaatcaagggacaga

SEQ ID NO: 265508 - DNA, 25 bp, Probe sequence
agttaaaggcacagatgttacaagt

SEQ ID NO: 265509 - DNA, 25 bp, Probe sequence
agaagttaaaggcacagatgttaca

SEQ ID NO: 265510 - DNA, 25 bp, Probe sequence
agctagtgacgtttcagaagttaaa

SEQ ID NO: 265511 - DNA, 25 bp, Probe sequence
acgtttcagaagttaaaggcacaga

SEQ ID NO: 265512 - DNA, 25 bp, Probe sequence
acaaaatcaagggacagaaacacaa

SEQ ID NO: 265513 - DNA, 25 bp, Probe sequence
aaaggcacagatgttacaagtaaag

SEQ ID NO: 265514 - DNA, 25 bp, Probe sequence
aatcaagggacagaaacacaagttg

SEQ ID NO: 265515 - DNA, 25 bp, Probe sequence
aagctagtgacgtttcagaagttaa

SEQ ID NO: 265516 - DNA, 25 bp, Probe sequence
aagttaaaggcacagatgttacaag

SEQ ID NO: 265517 - DNA, 25 bp, Probe sequence
aaggttacacaaaatcaagggacag

SEQ ID NO: 265518 - DNA, 25 bp, Probe sequence
aaggcacagatgttacaagtaaagt

SEQ ID NO: 265519 - DNA, 25 bp, Probe sequence
cagaagttaaaggcacagatgttac

SEQ ID NO: 265520 - DNA, 25 bp, Probe sequence
ctagtgacgtttcagaagttaaagg

SEQ ID NO: 265521 - DNA, 25 bp, Probe sequence
cgtttcagaagttaaaggcacagat

SEQ ID NO: 265522 - DNA, 25 bp, Probe sequence
gctagtgacgtttcagaagttaaag

SEQ ID NO: 265523 - DNA, 25 bp, Probe sequence
gaagttaaaggcacagatgttacaa

SEQ ID NO: 265524 - DNA, 25 bp, Probe sequence
gaagctagtgacgtttcagaagtta

SEQ ID NO: 265525 - DNA, 25 bp, Probe sequence
gacgtttcagaagttaaaggcacag

SEQ ID NO: 265526 - DNA, 25 bp, Probe sequence
gttacacaaaatcaagggacagaaa

SEQ ID NO: 265527 - DNA, 25 bp, Probe sequence
gttaaaggcacagatgttacaagta

SEQ ID NO: 265528 - DNA, 25 bp, Probe sequence
gtttcagaagttaaaggcacagatg

SEQ ID NO: 265529 - DNA, 25 bp, Probe sequence
gtgacgtttcagaagttaaaggcac

SEQ ID NO: 265530 - DNA, 25 bp, Probe sequence
ggttacacaaaatcaagggacagaa

SEQ ID NO: 265531 - DNA, 25 bp, Probe sequence
ggaagctagtgacgtttcagaagtt

SEQ ID NO: 265532 - DNA, 25 bp, Probe sequence
tgacgtttcagaagttaaaggcaca

SEQ ID NO: 265533 - DNA, 25 bp, Probe sequence
tagtgacgtttcagaagttaaaggc

SEQ ID NO: 265534 - DNA, 25 bp, Probe sequence
taaaggcacagatgttacaagtaaa

SEQ ID NO: 265535 - DNA, 25 bp, Probe sequence
taaagaagaagagaaacctcaagtt

SEQ ID NO: 265536 - DNA, 25 bp, Probe sequence
ttacacaaaatcaagggacagaaac

SEQ ID NO: 265537 - DNA, 25 bp, Probe sequence
ttaaaggcacagatgttacaagtaa

SEQ ID NO: 265538 - DNA, 25 bp, Probe sequence
ttcagaagttaaaggcacagatgtt

SEQ ID NO: 265539 - DNA, 25 bp, Probe sequence
atcagcagacgtagttgaagctaag

SEQ ID NO: 265540 - DNA, 25 bp, Probe sequence
atggtcaagctcaaggtccaatcga

SEQ ID NO: 265541 - DNA, 25 bp, Probe sequence
agtggatgaactaccagaagaacat

SEQ ID NO: 265542 - DNA, 25 bp, Probe sequence
agatcagcagacgtagttgaagcta

SEQ ID NO: 265543 - DNA, 25 bp, Probe sequence
agaacatggtcaagctcaaggtcca

SEQ ID NO: 265544 - DNA, 25 bp, Probe sequence
agacgtagttgaagctaaggaagct

SEQ ID NO: 265545 - DNA, 25 bp, Probe sequence
agctcaaggtccaatcgaggaaatc

SEQ ID NO: 265546 - DNA, 25 bp, Probe sequence
actagtggatgaactaccagaagaa

SEQ ID NO: 265547 - DNA, 25 bp, Probe sequence
acatggtcaagctcaaggtccaatc

SEQ ID NO: 265548 - DNA, 25 bp, Probe sequence
acaagatcagcagacgtagttgaag

SEQ ID NO: 265549 - DNA, 25 bp, Probe sequence
aacatggtcaagctcaaggtccaat

SEQ ID NO: 265550 - DNA, 25 bp, Probe sequence
aagctcaaggtccaatcgaggaaat

SEQ ID NO: 265551 - DNA, 25 bp, Probe sequence
aagatcagcagacgtagttgaagct

SEQ ID NO: 265552 - DNA, 25 bp, Probe sequence
caaggtccaatcgaggaaatcactg

SEQ ID NO: 265553 - DNA, 25 bp, Probe sequence
caagatcagcagacgtagttgaagc

SEQ ID NO: 265554 - DNA, 25 bp, Probe sequence
caagctcaaggtccaatcgaggaaa

SEQ ID NO: 265555 - DNA, 25 bp, Probe sequence
cagcagacgtagttgaagctaagga

SEQ ID NO: 265556 - DNA, 25 bp, Probe sequence
catggtcaagctcaaggtccaatcg

SEQ ID NO: 265557 - DNA, 25 bp, Probe sequence
ctcaaggtccaatcgaggaaatcac

SEQ ID NO: 265558 - DNA, 25 bp, Probe sequence
ctcaaatccaaggtcaaaataatgg

SEQ ID NO: 265559 - DNA, 25 bp, Probe sequence
gctcaaggtccaatcgaggaaatca

SEQ ID NO: 265560 - DNA, 25 bp, Probe sequence
gcagacgtagttgaagctaaggaag

SEQ ID NO: 265561 - DNA, 25 bp, Probe sequence
gaactagtggatgaactaccagaag

SEQ ID NO: 265562 - DNA, 25 bp, Probe sequence
gaacatggtcaagctcaaggtccaa

SEQ ID NO: 265563 - DNA, 25 bp, Probe sequence
gacaagatcagcagacgtagttgaa

SEQ ID NO: 265564 - DNA, 25 bp, Probe sequence
gatcagcagacgtagttgaagctaa

SEQ ID NO: 265565 - DNA, 25 bp, Probe sequence
gtcaagctcaaggtccaatcgagga

SEQ ID NO: 265566 - DNA, 25 bp, Probe sequence
gtggatgaactaccagaagaacatg

SEQ ID NO: 265567 - DNA, 25 bp, Probe sequence
ggtcaagctcaaggtccaatcgagg

SEQ ID NO: 265568 - DNA, 25 bp, Probe sequence
tggtcaagctcaaggtccaatcgag

SEQ ID NO: 265569 - DNA, 25 bp, Probe sequence
tggatgaactaccagaagaacatgg

SEQ ID NO: 265570 - DNA, 25 bp, Probe sequence
tcaagctcaaggtccaatcgaggaa

SEQ ID NO: 265571 - DNA, 25 bp, Probe sequence
tcaaggtccaatcgaggaaatcact

SEQ ID NO: 265572 - DNA, 25 bp, Probe sequence
ttgaactagtggatgaactaccaga

SEQ ID NO: 265573 - DNA, 25 bp, Probe sequence
atgttggagttgaaaatgggctacc

SEQ ID NO: 265574 - DNA, 25 bp, Probe sequence
atggctatacattaacatgggataa

SEQ ID NO: 265575 - DNA, 25 bp, Probe sequence
agtgagccaggtaagccaacaccac

SEQ ID NO: 265576 - DNA, 25 bp, Probe sequence
agaactcaattaactggataccctg

SEQ ID NO: 265577 - DNA, 25 bp, Probe sequence
actggataccctgaaaatcgctata

SEQ ID NO: 265578 - DNA, 25 bp, Probe sequence
aaatgggctaccacaaagtgtttat

SEQ ID NO: 265579 - DNA, 25 bp, Probe sequence
aatggttcgattgaaacgtttgaca

SEQ ID NO: 265580 - DNA, 25 bp, Probe sequence
aaggaaataatgttcagcctcatga

SEQ ID NO: 265581 - DNA, 25 bp, Probe sequence
aatggacaacaaacaataacttcaa

SEQ ID NO: 265582 - DNA, 25 bp, Probe sequence
aatatggtccaatcgtagactccaa

SEQ ID NO: 265583 - DNA, 25 bp, Probe sequence
aataaacttattcatagatcctaaa

SEQ ID NO: 265584 - DNA, 25 bp, Probe sequence
aatacagtggacagcacacaattga

SEQ ID NO: 265585 - DNA, 25 bp, Probe sequence
aattcattacaccggagattactta

SEQ ID NO: 265586 - DNA, 25 bp, Probe sequence
cacaagggccagtcgaggaaatcac

SEQ ID NO: 265587 - DNA, 25 bp, Probe sequence
cacacgtagcatatattaagcctat

SEQ ID NO: 265588 - DNA, 25 bp, Probe sequence
cgccaacgccagaagtgccaagtga

SEQ ID NO: 265589 - DNA, 25 bp, Probe sequence
ccaagtgagccaggcacaccaacac

SEQ ID NO: 265590 - DNA, 25 bp, Probe sequence
gccagaagtgccaagtgagccaggt

SEQ ID NO: 265591 - DNA, 25 bp, Probe sequence
gttcagcctcatgaagggcaacgtg

SEQ ID NO: 265592 - DNA, 25 bp, Probe sequence
gaagggcaacgtgtagtattaaagt

SEQ ID NO: 265593 - DNA, 25 bp, Probe sequence
gaaaacaggcgattattttgatttt

SEQ ID NO: 265594 - DNA, 25 bp, Probe sequence
gaaacatcaggaactatgcaaataa

SEQ ID NO: 265595 - DNA, 25 bp, Probe sequence
gactccaataactttgagttctctg

SEQ ID NO: 265596 - DNA, 25 bp, Probe sequence
gagttctctgaagatagtggtaatg

SEQ ID NO: 265597 - DNA, 25 bp, Probe sequence
gttactgtaacgggtatgttgacac

SEQ ID NO: 265598 - DNA, 25 bp, Probe sequence
gtacaaaacaatggtagctactcat

SEQ ID NO: 265599 - DNA, 25 bp, Probe sequence
gtgaagtgaactttagaactcaatt

SEQ ID NO: 265600 - DNA, 25 bp, Probe sequence
gtggtaatggttcaatcagcggaca

SEQ ID NO: 265601 - DNA, 25 bp, Probe sequence
ggtcaggtattagataatggccgaa

SEQ ID NO: 265602 - DNA, 25 bp, Probe sequence
ggtaccaagtgagccaggcacacca

SEQ ID NO: 265603 - DNA, 25 bp, Probe sequence
ggtagctactcattaaattttgaca

SEQ ID NO: 265604 - DNA, 25 bp, Probe sequence
tccaatcgtagactccaataacttt

SEQ ID NO: 265605 - DNA, 25 bp, Probe sequence
tcagcggacaatacgatgcgaagca

SEQ ID NO: 265606 - DNA, 25 bp, Probe sequence
tagttatggctaaaggtcaggtatt

SEQ ID NO: 265607 - DNA, 25 bp, Probe sequence
attggcaatcaatcatttgaagaag

SEQ ID NO: 265608 - DNA, 25 bp, Probe sequence
atttggcggacacaatggcattgac

SEQ ID NO: 265609 - DNA, 25 bp, Probe sequence
atatcgacttcgatagcgtacctca

SEQ ID NO: 265610 - DNA, 25 bp, Probe sequence
atagcgtacctcaaattcaaggtca

SEQ ID NO: 265611 - DNA, 25 bp, Probe sequence
atactggcaatcaatcatttgaaga

SEQ ID NO: 265612 - DNA, 25 bp, Probe sequence
atcaatttggcggacacaatggcat

SEQ ID NO: 265613 - DNA, 25 bp, Probe sequence
atcgacttcgatagcgtacctcaaa

SEQ ID NO: 265614 - DNA, 25 bp, Probe sequence
atggcattgactttgtagaagatac

SEQ ID NO: 265615 - DNA, 25 bp, Probe sequence
agcgtacctcaaattcaaggtcaaa

SEQ ID NO: 265616 - DNA, 25 bp, Probe sequence
accaagttatcaatttggcggacac

SEQ ID NO: 265617 - DNA, 25 bp, Probe sequence
actggcaatcaatcatttgaagaag

SEQ ID NO: 265618 - DNA, 25 bp, Probe sequence
acacaatggcattgactttgtagaa

SEQ ID NO: 265619 - DNA, 25 bp, Probe sequence
aaatattggcaatcaatcatttgaa

SEQ ID NO: 265620 - DNA, 25 bp, Probe sequence
aaatactggcaatcaatcatttgaa

SEQ ID NO: 265621 - DNA, 25 bp, Probe sequence
aatttggcggacacaatggcattga

SEQ ID NO: 265622 - DNA, 25 bp, Probe sequence
caatggcattgactttgtagaagat

SEQ ID NO: 265623 - DNA, 25 bp, Probe sequence
caaaatactggcaatcaatcatttg

SEQ ID NO: 265624 - DNA, 25 bp, Probe sequence
ccaagttatcaatttggcggacaca

SEQ ID NO: 265625 - DNA, 25 bp, Probe sequence
gcggacacaatggcattgactttgt

SEQ ID NO: 265626 - DNA, 25 bp, Probe sequence
gatatcgacttcgatagcgtacctc

SEQ ID NO: 265627 - DNA, 25 bp, Probe sequence
gatagcgtacctcaaattcaaggtc

SEQ ID NO: 265628 - DNA, 25 bp, Probe sequence
gtagatatcgacttcgatagcgtac

SEQ ID NO: 265629 - DNA, 25 bp, Probe sequence
ggacacaatggcattgactttgtag

SEQ ID NO: 265630 - DNA, 25 bp, Probe sequence
ggcattgactttgtagaagatacac

SEQ ID NO: 265631 - DNA, 25 bp, Probe sequence
ggcggacacaatggcattgactttg

SEQ ID NO: 265632 - DNA, 25 bp, Probe sequence
tggcggacacaatggcattgacttt

SEQ ID NO: 265633 - DNA, 25 bp, Probe sequence
tcgacttcgatagcgtacctcaaat

SEQ ID NO: 265634 - DNA, 25 bp, Probe sequence
tcgatagcgtacctcaaattcaagg

SEQ ID NO: 265635 - DNA, 25 bp, Probe sequence
tcaaggtcaaaatattggcaatcaa

SEQ ID NO: 265636 - DNA, 25 bp, Probe sequence
tcaatttggcggacacaatggcatt

SEQ ID NO: 265637 - DNA, 25 bp, Probe sequence
tagcgtacctcaaattcaaggtcaa

SEQ ID NO: 265638 - DNA, 25 bp, Probe sequence
tatcaatttggcggacacaatggca

SEQ ID NO: 265639 - DNA, 25 bp, Probe sequence
tatcgacttcgatagcgtacctcaa

SEQ ID NO: 265640 - DNA, 25 bp, Probe sequence
tttggcggacacaatggcattgact

SEQ ID NO: 265641 - DNA, 25 bp, Probe sequence
aaacaacggcatgttgttcggcgga

SEQ ID NO: 265642 - DNA, 25 bp, Probe sequence
agaacatagtactcctatcgaactt

SEQ ID NO: 265643 - DNA, 25 bp, Probe sequence
acacattggttcagacgatttagct

SEQ ID NO: 265644 - DNA, 25 bp, Probe sequence
acaaccagtcgttaagctctgtgac

SEQ ID NO: 265645 - DNA, 25 bp, Probe sequence
aaattgggtgagactacggttagca

SEQ ID NO: 265646 - DNA, 25 bp, Probe sequence
aaagcttgatgatgtcagcaaattt

SEQ ID NO: 265647 - DNA, 25 bp, Probe sequence
aactgctgaattatctttaaatcta

SEQ ID NO: 265648 - DNA, 25 bp, Probe sequence
aagcaccgaaaactgtgcaagcacc

SEQ ID NO: 265649 - DNA, 25 bp, Probe sequence
aagcgataatgttgaaactcatggt

SEQ ID NO: 265650 - DNA, 25 bp, Probe sequence
aagctctgtgacagtaactggtcaa

SEQ ID NO: 265651 - DNA, 25 bp, Probe sequence
aatgctagcaacttagaatttcaaa

SEQ ID NO: 265652 - DNA, 25 bp, Probe sequence
caaggcgacggcaaagataaactaa

SEQ ID NO: 265653 - DNA, 25 bp, Probe sequence
cacctttttggatattataactatt

SEQ ID NO: 265654 - DNA, 25 bp, Probe sequence
ctggtgctgttagcgatcatacaac

SEQ ID NO: 265655 - DNA, 25 bp, Probe sequence
gcgtacatgaaacctaacaaccagt

SEQ ID NO: 265656 - DNA, 25 bp, Probe sequence
gctaatggtcgaattgatactttaa

SEQ ID NO: 265657 - DNA, 25 bp, Probe sequence
gaatttcaaacacacctttttggat

SEQ ID NO: 265658 - DNA, 25 bp, Probe sequence
gaacttgaatttaaatcagagccgc

SEQ ID NO: 265659 - DNA, 25 bp, Probe sequence
gaaaaatggcgttgcattttactct

SEQ ID NO: 265660 - DNA, 25 bp, Probe sequence
gttcggcggattatttagcatttta

SEQ ID NO: 265661 - DNA, 25 bp, Probe sequence
gatggtcaagttatggcgacaggag

SEQ ID NO: 265662 - DNA, 25 bp, Probe sequence
gatacgaatgttgtaaatcctcata

SEQ ID NO: 265663 - DNA, 25 bp, Probe sequence
gatactaatggtggttattctttaa

SEQ ID NO: 265664 - DNA, 25 bp, Probe sequence
gatttagctgaaagcgtatatgcaa

SEQ ID NO: 265665 - DNA, 25 bp, Probe sequence
gattctattcatgtagactttgaag

SEQ ID NO: 265666 - DNA, 25 bp, Probe sequence
gtactcctatcgaacttgaatttaa

SEQ ID NO: 265667 - DNA, 25 bp, Probe sequence
gggtattatgattcaaatgctagca

SEQ ID NO: 265668 - DNA, 25 bp, Probe sequence
ggggagtaacagctaatggtcgaat

SEQ ID NO: 265669 - DNA, 25 bp, Probe sequence
ggtattgtaactggtgctgttagcg

SEQ ID NO: 265670 - DNA, 25 bp, Probe sequence
ggaaatttagtcattttgcgtacat

SEQ ID NO: 265671 - DNA, 25 bp, Probe sequence
tgtaaatcctcataacgcagaaaga

SEQ ID NO: 265672 - DNA, 25 bp, Probe sequence
tgatcctacaacagtgacgcaaaaa

SEQ ID NO: 265673 - DNA, 25 bp, Probe sequence
taaatctatttattgatcctacaac

SEQ ID NO: 265674 - DNA, 25 bp, Probe sequence
tttagcattttaggtttagcgttat

SEQ ID NO: 265675 - DNA, 25 bp, Probe sequence
attacccgtattatccagttcaatt

SEQ ID NO: 265676 - DNA, 25 bp, Probe sequence
atattgttaatccgcataatgctca

SEQ ID NO: 265677 - DNA, 25 bp, Probe sequence
atatgtgaagcctaacaaccagtcg

SEQ ID NO: 265678 - DNA, 25 bp, Probe sequence
ataatgctaaaggcgatggtaaaga

SEQ ID NO: 265679 - DNA, 25 bp, Probe sequence
atcacaagaagatttaccatcagaa

SEQ ID NO: 265680 - DNA, 25 bp, Probe sequence
agtgagccaggcgaaccaacgccac

SEQ ID NO: 265681 - DNA, 25 bp, Probe sequence
agtaccgagtgagccaggcgaacca

SEQ ID NO: 265682 - DNA, 25 bp, Probe sequence
agatagaatgggtgttactgttaat

SEQ ID NO: 265683 - DNA, 25 bp, Probe sequence
agcaaccatcaaaatcaactcaagt

SEQ ID NO: 265684 - DNA, 25 bp, Probe sequence
agccattttgcatatgtgaagccta

SEQ ID NO: 265685 - DNA, 25 bp, Probe sequence
actgttaatggtcgtattgatactt

SEQ ID NO: 265686 - DNA, 25 bp, Probe sequence
acaaccagtcgttaacttctgtcac

SEQ ID NO: 265687 - DNA, 25 bp, Probe sequence
aaacacatggtatatcaacactgcg

SEQ ID NO: 265688 - DNA, 25 bp, Probe sequence
aacttctgtcacagtaactggtcaa

SEQ ID NO: 265689 - DNA, 25 bp, Probe sequence
aactggtcaagtaacatctggatat

SEQ ID NO: 265690 - DNA, 25 bp, Probe sequence
aagttatggcaaatggtcaagttat

SEQ ID NO: 265691 - DNA, 25 bp, Probe sequence
aagtgctaataatccaacagtcaaa

SEQ ID NO: 265692 - DNA, 25 bp, Probe sequence
aatgaacgtacaattcgctatacat

SEQ ID NO: 265693 - DNA, 25 bp, Probe sequence
gcaaagcttgatgataccagtaaat

SEQ ID NO: 265694 - DNA, 25 bp, Probe sequence
gaattagctgaaagtgtttatgcaa

SEQ ID NO: 265695 - DNA, 25 bp, Probe sequence
gacccaacaacagtgacaaagcaag

SEQ ID NO: 265696 - DNA, 25 bp, Probe sequence
gagggtaaatttagccattttgcat

SEQ ID NO: 265697 - DNA, 25 bp, Probe sequence
gatatcaaatatttagacggcgtta

SEQ ID NO: 265698 - DNA, 25 bp, Probe sequence
ggtgggtacacattgaaccttggcg

SEQ ID NO: 265699 - DNA, 25 bp, Probe sequence
gtggaagttactgaaagctctttag

SEQ ID NO: 265700 - DNA, 25 bp, Probe sequence
ggatatcataaatactacccatact

SEQ ID NO: 265701 - DNA, 25 bp, Probe sequence
ggatctaaatttccgaacacatctt

SEQ ID NO: 265702 - DNA, 25 bp, Probe sequence
ggaacaacggtgttgcattttactc

SEQ ID NO: 265703 - DNA, 25 bp, Probe sequence
tccgaacacatctttcaggatatca

SEQ ID NO: 265704 - DNA, 25 bp, Probe sequence
taaacctattcattgacccaacaac

SEQ ID NO: 265705 - DNA, 25 bp, Probe sequence
tacaattcgctatacatttactgat

SEQ ID NO: 265706 - DNA, 25 bp, Probe sequence
tactacccatactatccttattacc

SEQ ID NO: 265707 - DNA, 25 bp, Probe sequence
tactatccttattacccgtattatc

SEQ ID NO: 265708 - DNA, 25 bp, Probe sequence
ttgaaccttggcgatttagataatt

SEQ ID NO: 265709 - DNA, 25 bp, Probe sequence
attattatccagtaagtttaacatg

SEQ ID NO: 265710 - DNA, 25 bp, Probe sequence
atttgtttattgatccaactacagt

SEQ ID NO: 265711 - DNA, 25 bp, Probe sequence
atatcaaatatctagacggtgttaa

SEQ ID NO: 265712 - DNA, 25 bp, Probe sequence
atgttgttaatcctcataatgcaga

SEQ ID NO: 265713 - DNA, 25 bp, Probe sequence
atggctatcatgctaattacggtta

SEQ ID NO: 265714 - DNA, 25 bp, Probe sequence
agatgttaccaatgacatgagtgat

SEQ ID NO: 265715 - DNA, 25 bp, Probe sequence
agatgataatattttggctgttggc

SEQ ID NO: 265716 - DNA, 25 bp, Probe sequence
agcgtctatgctaacacaaatgatc

SEQ ID NO: 265717 - DNA, 25 bp, Probe sequence
acatcatttagcttatataaaccct

SEQ ID NO: 265718 - DNA, 25 bp, Probe sequence
acagcgtgccacatattcatggatt

SEQ ID NO: 265719 - DNA, 25 bp, Probe sequence
aaatgttccaacagtgaaagtttat

SEQ ID NO: 265720 - DNA, 25 bp, Probe sequence
aaagcgatatgacctcaataactat

SEQ ID NO: 265721 - DNA, 25 bp, Probe sequence
aaggtatactgttcggaggattgtt

SEQ ID NO: 265722 - DNA, 25 bp, Probe sequence
ctgatgttacagcagttacagagaa

SEQ ID NO: 265723 - DNA, 25 bp, Probe sequence
ccgggggactactttgatttcacat

SEQ ID NO: 265724 - DNA, 25 bp, Probe sequence
ccaactacagttacgaagcaaggaa

SEQ ID NO: 265725 - DNA, 25 bp, Probe sequence
gcctcttcgtaaagttccagatata

SEQ ID NO: 265726 - DNA, 25 bp, Probe sequence
gcgacggtaaagataagccaaatga

SEQ ID NO: 265727 - DNA, 25 bp, Probe sequence
gcaaggaaagcaaactgttgaggtt

SEQ ID NO: 265728 - DNA, 25 bp, Probe sequence
gaaattcgaggatggtattaaaccg

SEQ ID NO: 265729 - DNA, 25 bp, Probe sequence
gacaatggcgttgcattctactcta

SEQ ID NO: 265730 - DNA, 25 bp, Probe sequence
gtttaacatgggacaatggcgttgc

SEQ ID NO: 265731 - DNA, 25 bp, Probe sequence
gtgatgaattaccagaaagcgtcta

SEQ ID NO: 265732 - DNA, 25 bp, Probe sequence
gtggattgtatacaggaaatgttcc

SEQ ID NO: 265733 - DNA, 25 bp, Probe sequence
ggggagtaactgtaaatggacgtat

SEQ ID NO: 265734 - DNA, 25 bp, Probe sequence
ggtagtgaaatagtagggcataaca

SEQ ID NO: 265735 - DNA, 25 bp, Probe sequence
ggaggattgtttagtattttaggat

SEQ ID NO: 265736 - DNA, 25 bp, Probe sequence
ggctgttggcaaagtgatggatgaa

SEQ ID NO: 265737 - DNA, 25 bp, Probe sequence
tgggttttttgctaaaggtggattg

SEQ ID NO: 265738 - DNA, 25 bp, Probe sequence
tctcgcctcttcgtaaagttccaga

SEQ ID NO: 265739 - DNA, 25 bp, Probe sequence
tcgacagcgtgccacatattcatgg

SEQ ID NO: 265740 - DNA, 25 bp, Probe sequence
tttaggatttgcattattacgcaga

SEQ ID NO: 265741 - DNA, 25 bp, Probe sequence
ttacggttattactattattatcca

SEQ ID NO: 265742 - DNA, 25 bp, Probe sequence
ttcagaactaatttgcatggctatc

SEQ ID NO: 265743 - DNA, 25 bp, Probe sequence
attctattttgttgattatgacttc

SEQ ID NO: 265744 - DNA, 25 bp, Probe sequence
attattataatgtattttgtcaaaa

SEQ ID NO: 265745 - DNA, 25 bp, Probe sequence
atttcgactatcttactgcttactt

SEQ ID NO: 265746 - DNA, 25 bp, Probe sequence
agttatttcgactatcttactgctt

SEQ ID NO: 265747 - DNA, 25 bp, Probe sequence
aatgtttgatagcgcgtccttaatc

SEQ ID NO: 265748 - DNA, 25 bp, Probe sequence
acagtaaacttgattattttttcat

SEQ ID NO: 265749 - DNA, 25 bp, Probe sequence
aaatgtttgatagcgcgtccttaat

SEQ ID NO: 265750 - DNA, 25 bp, Probe sequence
aaaatgtttgatagcgcgtccttaa

SEQ ID NO: 265751 - DNA, 25 bp, Probe sequence
cattatttttcttttattcacaaat

SEQ ID NO: 265752 - DNA, 25 bp, Probe sequence
ccctagcttttttgtagtttatgtg

SEQ ID NO: 265753 - DNA, 25 bp, Probe sequence
gacattatcgttatttctatttaaa

SEQ ID NO: 265754 - DNA, 25 bp, Probe sequence
gatattaatgtttacaataccagct

SEQ ID NO: 265755 - DNA, 25 bp, Probe sequence
gttatttcgactatcttactgctta

SEQ ID NO: 265756 - DNA, 25 bp, Probe sequence
gttttattcgtattaactcaaatga

SEQ ID NO: 265757 - DNA, 25 bp, Probe sequence
gtttacaataccagctataattagt

SEQ ID NO: 265758 - DNA, 25 bp, Probe sequence
gtagtttatgtgactattagtatac

SEQ ID NO: 265759 - DNA, 25 bp, Probe sequence
gtgactattagtatactattctcat

SEQ ID NO: 265760 - DNA, 25 bp, Probe sequence
ggtattctattttgttgattatgac

SEQ ID NO: 265761 - DNA, 25 bp, Probe sequence
tgtaatattccctagcttttttgta

SEQ ID NO: 265762 - DNA, 25 bp, Probe sequence
tgtttgatagcgcgtccttaatcat

SEQ ID NO: 265763 - DNA, 25 bp, Probe sequence
taatattccctagcttttttgtagt

SEQ ID NO: 265764 - DNA, 25 bp, Probe sequence
taatgtttacaataccagctataat

SEQ ID NO: 265765 - DNA, 25 bp, Probe sequence
tatcgttatttctatttaaaatgtt

SEQ ID NO: 265766 - DNA, 25 bp, Probe sequence
tttgtaatattccctagcttttttg

SEQ ID NO: 265767 - DNA, 25 bp, Probe sequence
tatttcgactatcttactgcttact

SEQ ID NO: 265768 - DNA, 25 bp, Probe sequence
tatttgtaatattccctagcttttt

SEQ ID NO: 265769 - DNA, 25 bp, Probe sequence
tattcgtattaactcaaatgatatt

SEQ ID NO: 265770 - DNA, 25 bp, Probe sequence
tttcattatttttcttttattcaca

SEQ ID NO: 265771 - DNA, 25 bp, Probe sequence
ttatttcgactatcttactgcttac

SEQ ID NO: 265772 - DNA, 25 bp, Probe sequence
ttagtggtattaagtacagtaaact

SEQ ID NO: 265773 - DNA, 25 bp, Probe sequence
ttagtatactattctcatatataat

SEQ ID NO: 265774 - DNA, 25 bp, Probe sequence
ttaaaatgtttgatagcgcgtcctt

SEQ ID NO: 265775 - DNA, 25 bp, Probe sequence
ttccctagcttttttgtagtttatg

SEQ ID NO: 265776 - DNA, 25 bp, Probe sequence
ttgttttattcgtattaactcaaat

SEQ ID NO: 265777 - DNA, 25 bp, Probe sequence
attcacatatattgtcaaaatcgtt

SEQ ID NO: 265778 - DNA, 25 bp, Probe sequence
atttcaaccattctactgcttactt

SEQ ID NO: 265779 - DNA, 25 bp, Probe sequence
atttcccatcttctttgtagtttat

SEQ ID NO: 265780 - DNA, 25 bp, Probe sequence
atatttcccatcttctttgtagttt

SEQ ID NO: 265781 - DNA, 25 bp, Probe sequence
atatcacgggtattacggcattatc

SEQ ID NO: 265782 - DNA, 25 bp, Probe sequence
atagttatttcaaccattctactgc

SEQ ID NO: 265783 - DNA, 25 bp, Probe sequence
atctgactatttgtatatcacgggt

SEQ ID NO: 265784 - DNA, 25 bp, Probe sequence
atgacctcgcagattattttatact

SEQ ID NO: 265785 - DNA, 25 bp, Probe sequence
actgtgcaaattacatgtatatagt

SEQ ID NO: 265786 - DNA, 25 bp, Probe sequence
acggcattatcgttaattctattta

SEQ ID NO: 265787 - DNA, 25 bp, Probe sequence
cattgtttttcttttattctcaaat

SEQ ID NO: 265788 - DNA, 25 bp, Probe sequence
ccatcaattattagtggtatcaaat

SEQ ID NO: 265789 - DNA, 25 bp, Probe sequence
gcagattattttatactgtgcaaat

SEQ ID NO: 265790 - DNA, 25 bp, Probe sequence
gacaatcagtatactattttcttat

SEQ ID NO: 265791 - DNA, 25 bp, Probe sequence
gagttctcaaaaagattagctcatc

SEQ ID NO: 265792 - DNA, 25 bp, Probe sequence
gattagctcatcatatctaatacta

SEQ ID NO: 265793 - DNA, 25 bp, Probe sequence
gttatttcaaccattctactgctta

SEQ ID NO: 265794 - DNA, 25 bp, Probe sequence
gtatcaaatacagtaaatctgacta

SEQ ID NO: 265795 - DNA, 25 bp, Probe sequence
gtagtttatgtgacaatcagtatac

SEQ ID NO: 265796 - DNA, 25 bp, Probe sequence
gtaaccttaataatactaactatat

SEQ ID NO: 265797 - DNA, 25 bp, Probe sequence
gtaatatttcccatcttctttgtag

SEQ ID NO: 265798 - DNA, 25 bp, Probe sequence
ggtattctattttgctgataatgac

SEQ ID NO: 265799 - DNA, 25 bp, Probe sequence
ggtattacggcattatcgttaattc

SEQ ID NO: 265800 - DNA, 25 bp, Probe sequence
tgtttacagtaccatcaattattag

SEQ ID NO: 265801 - DNA, 25 bp, Probe sequence
tgttatttcacaatttctccttaaa

SEQ ID NO: 265802 - DNA, 25 bp, Probe sequence
tcccatcttctttgtagtttatgtg

SEQ ID NO: 265803 - DNA, 25 bp, Probe sequence
tctattttgctgataatgacctcgc

SEQ ID NO: 265804 - DNA, 25 bp, Probe sequence
tcaaccattctactgcttacttttt

SEQ ID NO: 265805 - DNA, 25 bp, Probe sequence
taattttatcgatagcgtaacctta

SEQ ID NO: 265806 - DNA, 25 bp, Probe sequence
tatcgatagcgtaaccttaataata

SEQ ID NO: 265807 - DNA, 25 bp, Probe sequence
tatttcacaatttctccttaaagag

SEQ ID NO: 265808 - DNA, 25 bp, Probe sequence
tatttgtaatatttcccatcttctt

SEQ ID NO: 265809 - DNA, 25 bp, Probe sequence
tttcattgtttttcttttattctca

SEQ ID NO: 265810 - DNA, 25 bp, Probe sequence
ttgctgataatgacctcgcagatta

SEQ ID NO: 265811 - DNA, 25 bp, Probe sequence
attctacaaatacaagttcaaacgg

SEQ ID NO: 265812 - DNA, 25 bp, Probe sequence
attccaactttttcatctatcatat

SEQ ID NO: 265813 - DNA, 25 bp, Probe sequence
atttggtaagaatatctctaaagaa

SEQ ID NO: 265814 - DNA, 25 bp, Probe sequence
atttcattcgtattatttgcaacat

SEQ ID NO: 265815 - DNA, 25 bp, Probe sequence
atatatactttctttttcatcagtt

SEQ ID NO: 265816 - DNA, 25 bp, Probe sequence
atatgattataatttcattcgtatt

SEQ ID NO: 265817 - DNA, 25 bp, Probe sequence
atacaagttcaaacggtgatagctt

SEQ ID NO: 265818 - DNA, 25 bp, Probe sequence
atcctgcaatactcttaccattata

SEQ ID NO: 265819 - DNA, 25 bp, Probe sequence
actactgatcctgcaatactcttac

SEQ ID NO: 265820 - DNA, 25 bp, Probe sequence
acactactgatcctgcaatactctt

SEQ ID NO: 265821 - DNA, 25 bp, Probe sequence
aagaaaatacactactgatcctgca

SEQ ID NO: 265822 - DNA, 25 bp, Probe sequence
aatacactactgatcctgcaatact

SEQ ID NO: 265823 - DNA, 25 bp, Probe sequence
cattatatatactttctttttcatc

SEQ ID NO: 265824 - DNA, 25 bp, Probe sequence
cattcgtattatttgcaacatttgc

SEQ ID NO: 265825 - DNA, 25 bp, Probe sequence
ctttttcatcagtttcattattagc

SEQ ID NO: 265826 - DNA, 25 bp, Probe sequence
cctgcaatactcttaccattatata

SEQ ID NO: 265827 - DNA, 25 bp, Probe sequence
ccaactttttcatctatcatatttt

SEQ ID NO: 265828 - DNA, 25 bp, Probe sequence
gcatttttttatatttattctacaa

SEQ ID NO: 265829 - DNA, 25 bp, Probe sequence
gcaacatttgcatttttttatattt

SEQ ID NO: 265830 - DNA, 25 bp, Probe sequence
gtttcattattagcgacatatttgg

SEQ ID NO: 265831 - DNA, 25 bp, Probe sequence
gtatttgagtaattttgcaacagta

SEQ ID NO: 265832 - DNA, 25 bp, Probe sequence
gtaacaattttagtgaccatgatca

SEQ ID NO: 265833 - DNA, 25 bp, Probe sequence
gtgaccatgatcataatgtatttga

SEQ ID NO: 265834 - DNA, 25 bp, Probe sequence
tgagtaattttgcaacagtaggttt

SEQ ID NO: 265835 - DNA, 25 bp, Probe sequence
tgatcctgcaatactcttaccatta

SEQ ID NO: 265836 - DNA, 25 bp, Probe sequence
tgcaacagtaggtttgtttttaact

SEQ ID NO: 265837 - DNA, 25 bp, Probe sequence
tcatcagtttcattattagcgacat

SEQ ID NO: 265838 - DNA, 25 bp, Probe sequence
tcatctatcatatttttattcttta

SEQ ID NO: 265839 - DNA, 25 bp, Probe sequence
tcaaacggtgatagcttaattccat

SEQ ID NO: 265840 - DNA, 25 bp, Probe sequence
taaaaaatcatacttatctttaaat

SEQ ID NO: 265841 - DNA, 25 bp, Probe sequence
tactgatcctgcaatactcttacca

SEQ ID NO: 265842 - DNA, 25 bp, Probe sequence
tactcttaccattatatatactttc

SEQ ID NO: 265843 - DNA, 25 bp, Probe sequence
ttattagcgacatatttggtaagaa

SEQ ID NO: 265844 - DNA, 25 bp, Probe sequence
ttgattccaactttttcatctatca

SEQ ID NO: 265845 - DNA, 25 bp, Probe sequence
attggaatagtgttatcttcagtat

SEQ ID NO: 265846 - DNA, 25 bp, Probe sequence
attgtgcaaatttcgtttatatcat

SEQ ID NO: 265847 - DNA, 25 bp, Probe sequence
attgttcaagtttcattaatgttct

SEQ ID NO: 265848 - DNA, 25 bp, Probe sequence
atatcattattttttcatacattat

SEQ ID NO: 265849 - DNA, 25 bp, Probe sequence
atcaatttcttatgcacttgcctac

SEQ ID NO: 265850 - DNA, 25 bp, Probe sequence
atcttcagtatatttctttgacaaa

SEQ ID NO: 265851 - DNA, 25 bp, Probe sequence
atgttctttatatctgcatttatta

SEQ ID NO: 265852 - DNA, 25 bp, Probe sequence
atggtacatacctttctcttaataa

SEQ ID NO: 265853 - DNA, 25 bp, Probe sequence
actcaaatcattttatattgtgcaa

SEQ ID NO: 265854 - DNA, 25 bp, Probe sequence
acattataacaatttcacacagcgt

SEQ ID NO: 265855 - DNA, 25 bp, Probe sequence
aacagtattcgcttttattcttggg

SEQ ID NO: 265856 - DNA, 25 bp, Probe sequence
aattagactatattctgtattttta

SEQ ID NO: 265857 - DNA, 25 bp, Probe sequence
aattccttactgttataactattgt

SEQ ID NO: 265858 - DNA, 25 bp, Probe sequence
caatctttttggtagtgtatgtatc

SEQ ID NO: 265859 - DNA, 25 bp, Probe sequence
cacacagcgtgtttatagttctacc

SEQ ID NO: 265860 - DNA, 25 bp, Probe sequence
gcgagtgatgcatcaacaatcaaac

SEQ ID NO: 265861 - DNA, 25 bp, Probe sequence
gcgtgtttatagttctaccaatctt

SEQ ID NO: 265862 - DNA, 25 bp, Probe sequence
gcatattcgcaaattgatgcgagtg

SEQ ID NO: 265863 - DNA, 25 bp, Probe sequence
gcatcaacaatcaaacagtattcgc

SEQ ID NO: 265864 - DNA, 25 bp, Probe sequence
gaagtatttcactagttgttataac

SEQ ID NO: 265865 - DNA, 25 bp, Probe sequence
gttatagtaataacattctctttgt

SEQ ID NO: 265866 - DNA, 25 bp, Probe sequence
gtttatagttctaccaatctttttg

SEQ ID NO: 265867 - DNA, 25 bp, Probe sequence
gtttcattaatgttctttatatctg

SEQ ID NO: 265868 - DNA, 25 bp, Probe sequence
gtattcgcttttattcttgggaatt

SEQ ID NO: 265869 - DNA, 25 bp, Probe sequence
gtatcttaatttttatttattctca

SEQ ID NO: 265870 - DNA, 25 bp, Probe sequence
gtatgtatcaatttcttatgcactt

SEQ ID NO: 265871 - DNA, 25 bp, Probe sequence
gtaatggttactcaaatcattttat

SEQ ID NO: 265872 - DNA, 25 bp, Probe sequence
ggaattattatattactgagtatct

SEQ ID NO: 265873 - DNA, 25 bp, Probe sequence
tgcacttgcctacattttaaataga

SEQ ID NO: 265874 - DNA, 25 bp, Probe sequence
tacgttttatttgtaattgttcaag

SEQ ID NO: 265875 - DNA, 25 bp, Probe sequence
tatatctgcatttattagtggaata

SEQ ID NO: 265876 - DNA, 25 bp, Probe sequence
tattctgtatttttagtaatggtta

SEQ ID NO: 265877 - DNA, 25 bp, Probe sequence
ttcttatgcacttgcctacatttta

SEQ ID NO: 265878 - DNA, 25 bp, Probe sequence
ttctctttgttatttgcatattcgc

SEQ ID NO: 265879 - DNA, 25 bp, Probe sequence
attgatgatcctatcattcgagttg

SEQ ID NO: 265880 - DNA, 25 bp, Probe sequence
attcttgataacgcaatagaggcat

SEQ ID NO: 265881 - DNA, 25 bp, Probe sequence
ataccacgtattcatgaattgttcc

SEQ ID NO: 265882 - DNA, 25 bp, Probe sequence
atcctatcattcgagttgcatttat

SEQ ID NO: 265883 - DNA, 25 bp, Probe sequence
atgatcctatcattcgagttgcatt

SEQ ID NO: 265884 - DNA, 25 bp, Probe sequence
atgtgcagatgatataccacgtatt

SEQ ID NO: 265885 - DNA, 25 bp, Probe sequence
accacgtattcatgaattgttccaa

SEQ ID NO: 265886 - DNA, 25 bp, Probe sequence
aaatgtgcagatgatataccacgta

SEQ ID NO: 265887 - DNA, 25 bp, Probe sequence
aaaattttacgtgcacaagaaatga

SEQ ID NO: 265888 - DNA, 25 bp, Probe sequence
aagttaaatggtattgagaatctta

SEQ ID NO: 265889 - DNA, 25 bp, Probe sequence
aattgatgatcctatcattcgagtt

SEQ ID NO: 265890 - DNA, 25 bp, Probe sequence
cacgtattcatgaattgttccaaga

SEQ ID NO: 265891 - DNA, 25 bp, Probe sequence
cgtattcatgaattgttccaagaaa

SEQ ID NO: 265892 - DNA, 25 bp, Probe sequence
ccacgtattcatgaattgttccaag

SEQ ID NO: 265893 - DNA, 25 bp, Probe sequence
gctaaaattttacgtgcacaagaaa

SEQ ID NO: 265894 - DNA, 25 bp, Probe sequence
gcagatgatataccacgtattcatg

SEQ ID NO: 265895 - DNA, 25 bp, Probe sequence
gaatacacattaaagattgaagcaa

SEQ ID NO: 265896 - DNA, 25 bp, Probe sequence
gaaattgatgatcctatcattcgag

SEQ ID NO: 265897 - DNA, 25 bp, Probe sequence
gatgatcctatcattcgagttgcat

SEQ ID NO: 265898 - DNA, 25 bp, Probe sequence
gatcctatcattcgagttgcattta

SEQ ID NO: 265899 - DNA, 25 bp, Probe sequence
gatataccacgtattcatgaattgt

SEQ ID NO: 265900 - DNA, 25 bp, Probe sequence
gtattcatgaattgttccaagaaag

SEQ ID NO: 265901 - DNA, 25 bp, Probe sequence
gtgcagatgatataccacgtattca

SEQ ID NO: 265902 - DNA, 25 bp, Probe sequence
tgtgcagatgatataccacgtattc

SEQ ID NO: 265903 - DNA, 25 bp, Probe sequence
tgatgatcctatcattcgagttgca

SEQ ID NO: 265904 - DNA, 25 bp, Probe sequence
tgatcctatcattcgagttgcattt

SEQ ID NO: 265905 - DNA, 25 bp, Probe sequence
tgaaagcgaaaattcagtaacgttt

SEQ ID NO: 265906 - DNA, 25 bp, Probe sequence
tgcagatgatataccacgtattcat

SEQ ID NO: 265907 - DNA, 25 bp, Probe sequence
tcttgataacgcaatagaggcatca

SEQ ID NO: 265908 - DNA, 25 bp, Probe sequence
tcatgaattgttccaagaaagtttt

SEQ ID NO: 265909 - DNA, 25 bp, Probe sequence
taccacgtattcatgaattgttcca

SEQ ID NO: 265910 - DNA, 25 bp, Probe sequence
tataccacgtattcatgaattgttc

SEQ ID NO: 265911 - DNA, 25 bp, Probe sequence
tattattcttgataacgcaatagag

SEQ ID NO: 265912 - DNA, 25 bp, Probe sequence
ttgatgatcctatcattcgagttgc

SEQ ID NO: 265913 - DNA, 25 bp, Probe sequence
attagtatcgaaatacccgatgaag

SEQ ID NO: 265914 - DNA, 25 bp, Probe sequence
atacttataatgtcgcttttcaccc

SEQ ID NO: 265915 - DNA, 25 bp, Probe sequence
ataaatgcgctgatgatataccacg

SEQ ID NO: 265916 - DNA, 25 bp, Probe sequence
ataatgtcgcttttcacccttaaag

SEQ ID NO: 265917 - DNA, 25 bp, Probe sequence
ataatttttatctctgttgtaatac

SEQ ID NO: 265918 - DNA, 25 bp, Probe sequence
atgtcgcttttcacccttaaagaga

SEQ ID NO: 265919 - DNA, 25 bp, Probe sequence
accctatcattcgcgttgcatttat

SEQ ID NO: 265920 - DNA, 25 bp, Probe sequence
acttataatgtcgcttttcaccctt

SEQ ID NO: 265921 - DNA, 25 bp, Probe sequence
aaattgatgaccctatcattcgcgt

SEQ ID NO: 265922 - DNA, 25 bp, Probe sequence
aaatgcgctgatgatataccacgca

SEQ ID NO: 265923 - DNA, 25 bp, Probe sequence
aataaaaatattgtacctatgaaag

SEQ ID NO: 265924 - DNA, 25 bp, Probe sequence
aatacttataatgtcgcttttcacc

SEQ ID NO: 265925 - DNA, 25 bp, Probe sequence
aatttttatctctgttgtaatactt

SEQ ID NO: 265926 - DNA, 25 bp, Probe sequence
aattgatgaccctatcattcgcgtt

SEQ ID NO: 265927 - DNA, 25 bp, Probe sequence
cgcttttcacccttaaagagatgaa

SEQ ID NO: 265928 - DNA, 25 bp, Probe sequence
gcgctgatgatataccacgcattca

SEQ ID NO: 265929 - DNA, 25 bp, Probe sequence
gctgatgatataccacgcattcatg

SEQ ID NO: 265930 - DNA, 25 bp, Probe sequence
gaaatacccgatgaagtaagtagca

SEQ ID NO: 265931 - DNA, 25 bp, Probe sequence
gaaattgatgaccctatcattcgcg

SEQ ID NO: 265932 - DNA, 25 bp, Probe sequence
gataatgcaattgaggcatcaactg

SEQ ID NO: 265933 - DNA, 25 bp, Probe sequence
gttgtaatacttataatgtcgcttt

SEQ ID NO: 265934 - DNA, 25 bp, Probe sequence
gtaatacttataatgtcgcttttca

SEQ ID NO: 265935 - DNA, 25 bp, Probe sequence
gtcgcttttcacccttaaagagatg

SEQ ID NO: 265936 - DNA, 25 bp, Probe sequence
ggattaataatttttatctctgttg

SEQ ID NO: 265937 - DNA, 25 bp, Probe sequence
tgtcgcttttcacccttaaagagat

SEQ ID NO: 265938 - DNA, 25 bp, Probe sequence
tgttatgaataaatgcgctgatgat

SEQ ID NO: 265939 - DNA, 25 bp, Probe sequence
tgcaattgaggcatcaactgaaatt

SEQ ID NO: 265940 - DNA, 25 bp, Probe sequence
tcaactgaaattgatgaccctatca

SEQ ID NO: 265941 - DNA, 25 bp, Probe sequence
taataatttttatctctgttgtaat

SEQ ID NO: 265942 - DNA, 25 bp, Probe sequence
taatgtcgcttttcacccttaaaga

SEQ ID NO: 265943 - DNA, 25 bp, Probe sequence
tacttataatgtcgcttttcaccct

SEQ ID NO: 265944 - DNA, 25 bp, Probe sequence
tacccgatgaagtaagtagcattaa

SEQ ID NO: 265945 - DNA, 25 bp, Probe sequence
ttattcttgataatgcaattgaggc

SEQ ID NO: 265946 - DNA, 25 bp, Probe sequence
ttttatctctgttgtaatacttata

SEQ ID NO: 265947 - DNA, 25 bp, Probe sequence
cagtaaaaaactatgcttggaacct

SEQ ID NO: 265948 - DNA, 25 bp, Probe sequence
atcagagttcattgcttattatgat

SEQ ID NO: 265949 - DNA, 25 bp, Probe sequence
atgcttggaaccttcaaaaatctat

SEQ ID NO: 265950 - DNA, 25 bp, Probe sequence
atgcattcaatcaacagttacaatc

SEQ ID NO: 265951 - DNA, 25 bp, Probe sequence
acggcgttacaaggcaatacttgaa

SEQ ID NO: 265952 - DNA, 25 bp, Probe sequence
actatgcttggaaccttcaaaaatc

SEQ ID NO: 265953 - DNA, 25 bp, Probe sequence
cacttaaaaggtgatgcattcaatc

SEQ ID NO: 265954 - DNA, 25 bp, Probe sequence
ttaacggcgttacaaggcaatactt

SEQ ID NO: 265955 - DNA, 25 bp, Probe sequence
aaatcagagttcattgcttattatg

SEQ ID NO: 265956 - DNA, 25 bp, Probe sequence
aactatgcttggaaccttcaaaaat

SEQ ID NO: 265957 - DNA, 25 bp, Probe sequence
aacggcgttacaaggcaatacttga

SEQ ID NO: 265958 - DNA, 25 bp, Probe sequence
aaggcaatacttgaatttcagaaca

SEQ ID NO: 265959 - DNA, 25 bp, Probe sequence
aatcagagttcattgcttattatga

SEQ ID NO: 265960 - DNA, 25 bp, Probe sequence
cagatagtatcgatgatctggataa

SEQ ID NO: 265961 - DNA, 25 bp, Probe sequence
cagagttcattgcttattatgataa

SEQ ID NO: 265962 - DNA, 25 bp, Probe sequence
cattcaatcaacagttacaatcttt

SEQ ID NO: 265963 - DNA, 25 bp, Probe sequence
ctatgcttggaaccttcaaaaatct

SEQ ID NO: 265964 - DNA, 25 bp, Probe sequence
gcattcaatcaacagttacaatctt

SEQ ID NO: 265965 - DNA, 25 bp, Probe sequence
gaatttcagaacagatagtatcgat

SEQ ID NO: 265966 - DNA, 25 bp, Probe sequence
gaacagatagtatcgatgatctgga

SEQ ID NO: 265967 - DNA, 25 bp, Probe sequence
gaaatcagagttcattgcttattat

SEQ ID NO: 265968 - DNA, 25 bp, Probe sequence
gagttcattgcttattatgataaag

SEQ ID NO: 265969 - DNA, 25 bp, Probe sequence
gatgcattcaatcaacagttacaat

SEQ ID NO: 265970 - DNA, 25 bp, Probe sequence
gttacaaggcaatacttgaatttca

SEQ ID NO: 265971 - DNA, 25 bp, Probe sequence
ggcgttacaaggcaatacttgaatt

SEQ ID NO: 265972 - DNA, 25 bp, Probe sequence
ggcaatacttgaatttcagaacaga

SEQ ID NO: 265973 - DNA, 25 bp, Probe sequence
tgagcgaaaaacttcaagtaaaaca

SEQ ID NO: 265974 - DNA, 25 bp, Probe sequence
tgcattcaatcaacagttacaatct

SEQ ID NO: 265975 - DNA, 25 bp, Probe sequence
tctttgattaacaaatatccacaaa

SEQ ID NO: 265976 - DNA, 25 bp, Probe sequence
tcagaacagatagtatcgatgatct

SEQ ID NO: 265977 - DNA, 25 bp, Probe sequence
taaaaaactatgcttggaaccttca

SEQ ID NO: 265978 - DNA, 25 bp, Probe sequence
taacggcgttacaaggcaatacttg

SEQ ID NO: 265979 - DNA, 25 bp, Probe sequence
tatgcttggaaccttcaaaaatcta

SEQ ID NO: 265980 - DNA, 25 bp, Probe sequence
tttaacggcgttacaaggcaatact

SEQ ID NO: 265981 - DNA, 25 bp, Probe sequence
atagaaaatcagtacacgtcgcaag

SEQ ID NO: 265982 - DNA, 25 bp, Probe sequence
atcagtacacgtcgcaagagaacaa

SEQ ID NO: 265983 - DNA, 25 bp, Probe sequence
atcgcaatgatattgatgcacagga

SEQ ID NO: 265984 - DNA, 25 bp, Probe sequence
atgatattgatgcacaggagcgaaa

SEQ ID NO: 265985 - DNA, 25 bp, Probe sequence
agaagcacagtttcaaaagcaacaa

SEQ ID NO: 265986 - DNA, 25 bp, Probe sequence
aatgcgtgttgttcgtaggcgtatt

SEQ ID NO: 265987 - DNA, 25 bp, Probe sequence
aattgcgcgtgatgattattactta

SEQ ID NO: 265988 - DNA, 25 bp, Probe sequence
cttgcttgttgtccaaaaacatcgc

SEQ ID NO: 265989 - DNA, 25 bp, Probe sequence
cgtctagctcaaaatcttcgaaaaa

SEQ ID NO: 265990 - DNA, 25 bp, Probe sequence
gcgaaaagcgaaagaagcacagttt

SEQ ID NO: 265991 - DNA, 25 bp, Probe sequence
gcgcgtgatgattattacttaagca

SEQ ID NO: 265992 - DNA, 25 bp, Probe sequence
gcgtgttgttcgtaggcgtattaca

SEQ ID NO: 265993 - DNA, 25 bp, Probe sequence
gcttgttgtccaaaaacatcgcaat

SEQ ID NO: 265994 - DNA, 25 bp, Probe sequence
gaaaatgcgtgttgttcgtaggcgt

SEQ ID NO: 265995 - DNA, 25 bp, Probe sequence
gaaaatcagtacacgtcgcaagaga

SEQ ID NO: 265996 - DNA, 25 bp, Probe sequence
gaaaaaattgcgcgtgatgattatt

SEQ ID NO: 265997 - DNA, 25 bp, Probe sequence
gaaaagttgaataatctgaatgaca

SEQ ID NO: 265998 - DNA, 25 bp, Probe sequence
gacaaagattcgtctagctcaaaat

SEQ ID NO: 265999 - DNA, 25 bp, Probe sequence
gatgcacaggagcgaaaagcgaaag

SEQ ID NO: 266000 - DNA, 25 bp, Probe sequence
gattcgtctagctcaaaatcttcga

SEQ ID NO: 266001 - DNA, 25 bp, Probe sequence
gttgtccaaaaacatcgcaatgata

SEQ ID NO: 266002 - DNA, 25 bp, Probe sequence
gttgttcgtaggcgtattacagtat

SEQ ID NO: 266003 - DNA, 25 bp, Probe sequence
gttttatcaatcttgcttgttgtcc

SEQ ID NO: 266004 - DNA, 25 bp, Probe sequence
gtattacttgcgataattgttgttt

SEQ ID NO: 266005 - DNA, 25 bp, Probe sequence
gtaggcgtattacagtatttgcggg

SEQ ID NO: 266006 - DNA, 25 bp, Probe sequence
gtacacgtcgcaagagaacaagaaa

SEQ ID NO: 266007 - DNA, 25 bp, Probe sequence
gtgatttttaggttgccagaagaca

SEQ ID NO: 266008 - DNA, 25 bp, Probe sequence
gtgttgttcgtaggcgtattacagt

SEQ ID NO: 266009 - DNA, 25 bp, Probe sequence
ggtgaagtgatttttaggttgccag

SEQ ID NO: 266010 - DNA, 25 bp, Probe sequence
ggttgccagaagacaaagattcgtc

SEQ ID NO: 266011 - DNA, 25 bp, Probe sequence
tctagctcaaaatcttcgaaaaaat

SEQ ID NO: 266012 - DNA, 25 bp, Probe sequence
tcaatcttgcttgttgtccaaaaac

SEQ ID NO: 266013 - DNA, 25 bp, Probe sequence
ttatcaatcttgcttgttgtccaaa

SEQ ID NO: 266014 - DNA, 25 bp, Probe sequence
ttgttgttttatcaatcttgcttgt

SEQ ID NO: 266015 - DNA, 25 bp, Probe sequence
attcaaaattatccgagtatagaca

SEQ ID NO: 266016 - DNA, 25 bp, Probe sequence
attatccgagtatagacattgtgaa

SEQ ID NO: 266017 - DNA, 25 bp, Probe sequence
atttatttaacatatgtcaatcgaa

SEQ ID NO: 266018 - DNA, 25 bp, Probe sequence
atcgggaggatttatttaacatatg

SEQ ID NO: 266019 - DNA, 25 bp, Probe sequence
atccgagtatagacattgtgaaaaa

SEQ ID NO: 266020 - DNA, 25 bp, Probe sequence
aaattatccgagtatagacattgtg

SEQ ID NO: 266021 - DNA, 25 bp, Probe sequence
aaatcgaatcaaatcgggaggattt

SEQ ID NO: 266022 - DNA, 25 bp, Probe sequence
aaaatcgaatcaaatcgggaggatt

SEQ ID NO: 266023 - DNA, 25 bp, Probe sequence
aaaattatccgagtatagacattgt

SEQ ID NO: 266024 - DNA, 25 bp, Probe sequence
aatcgggaggatttatttaacatat

SEQ ID NO: 266025 - DNA, 25 bp, Probe sequence
aatcgaatcaaatcgggaggattta

SEQ ID NO: 266026 - DNA, 25 bp, Probe sequence
aattatccgagtatagacattgtga

SEQ ID NO: 266027 - DNA, 25 bp, Probe sequence
caaaattatccgagtatagacattg

SEQ ID NO: 266028 - DNA, 25 bp, Probe sequence
cgggaggatttatttaacatatgtc

SEQ ID NO: 266029 - DNA, 25 bp, Probe sequence
gaaaatcgaatcaaatcgggaggat

SEQ ID NO: 266030 - DNA, 25 bp, Probe sequence
gacattgtgaaaaaatccaaacaag

SEQ ID NO: 266031 - DNA, 25 bp, Probe sequence
gaggatttatttaacatatgtcaat

SEQ ID NO: 266032 - DNA, 25 bp, Probe sequence
gatttatttaacatatgtcaatcga

SEQ ID NO: 266033 - DNA, 25 bp, Probe sequence
gattcaaaattatccgagtatagac

SEQ ID NO: 266034 - DNA, 25 bp, Probe sequence
gggaaaatcgaatcaaatcgggagg

SEQ ID NO: 266035 - DNA, 25 bp, Probe sequence
gggaggatttatttaacatatgtca

SEQ ID NO: 266036 - DNA, 25 bp, Probe sequence
ggatttatttaacatatgtcaatcg

SEQ ID NO: 266037 - DNA, 25 bp, Probe sequence
ggaggatttatttaacatatgtcaa

SEQ ID NO: 266038 - DNA, 25 bp, Probe sequence
ggaaaatcgaatcaaatcgggagga

SEQ ID NO: 266039 - DNA, 25 bp, Probe sequence
tgattcaaaattatccgagtataga

SEQ ID NO: 266040 - DNA, 25 bp, Probe sequence
tcgggaggatttatttaacatatgt

SEQ ID NO: 266041 - DNA, 25 bp, Probe sequence
tcaaaattatccgagtatagacatt

SEQ ID NO: 266042 - DNA, 25 bp, Probe sequence
tagacattgtgaaaaaatccaaaca

SEQ ID NO: 266043 - DNA, 25 bp, Probe sequence
tatccgagtatagacattgtgaaaa

SEQ ID NO: 266044 - DNA, 25 bp, Probe sequence
tatttaacatatgtcaatcgaagtt

SEQ ID NO: 266045 - DNA, 25 bp, Probe sequence
ttatttaacatatgtcaatcgaagt

SEQ ID NO: 266046 - DNA, 25 bp, Probe sequence
ttatccgagtatagacattgtgaaa

SEQ ID NO: 266047 - DNA, 25 bp, Probe sequence
ttcaaaattatccgagtatagacat

SEQ ID NO: 266048 - DNA, 25 bp, Probe sequence
ttgattcaaaattatccgagtatag

SEQ ID NO: 266049 - DNA, 25 bp, Probe sequence
attcgagacatgctgaaatcacaaa

SEQ ID NO: 266050 - DNA, 25 bp, Probe sequence
aggcaactttattttagttcacgat

SEQ ID NO: 266051 - DNA, 25 bp, Probe sequence
agcgaagcctggcgagattagttgg

SEQ ID NO: 266052 - DNA, 25 bp, Probe sequence
aaatatatcgctgcttttcatgaag

SEQ ID NO: 266053 - DNA, 25 bp, Probe sequence
aacaaagattttgcacgagcagatg

SEQ ID NO: 266054 - DNA, 25 bp, Probe sequence
aagcagtttatcaaattttcagcga

SEQ ID NO: 266055 - DNA, 25 bp, Probe sequence
aatgagtaaatcactaggcaacttt

SEQ ID NO: 266056 - DNA, 25 bp, Probe sequence
catgcgggtggttcagatttacaat

SEQ ID NO: 266057 - DNA, 25 bp, Probe sequence
ctacaattgatatacatgcgggtgg

SEQ ID NO: 266058 - DNA, 25 bp, Probe sequence
ctgtaatggcatttcatgagctagg

SEQ ID NO: 266059 - DNA, 25 bp, Probe sequence
cgtagtggactagagcgtattcgca

SEQ ID NO: 266060 - DNA, 25 bp, Probe sequence
cgctgcttttcatgaagatgttggt

SEQ ID NO: 266061 - DNA, 25 bp, Probe sequence
gctaatgcaattacagcttggtatg

SEQ ID NO: 266062 - DNA, 25 bp, Probe sequence
gcacttgattttacattgtggaaaa

SEQ ID NO: 266063 - DNA, 25 bp, Probe sequence
gcaagaccagcaattaattatgacg

SEQ ID NO: 266064 - DNA, 25 bp, Probe sequence
gaatcagcacgtagtggactagagc

SEQ ID NO: 266065 - DNA, 25 bp, Probe sequence
gaagacacacctcaaggggttagat

SEQ ID NO: 266066 - DNA, 25 bp, Probe sequence
gaagagcgcgcacaaattgctacta

SEQ ID NO: 266067 - DNA, 25 bp, Probe sequence
gaaaagcgacttcaaatccaagggt

SEQ ID NO: 266068 - DNA, 25 bp, Probe sequence
gacttaaaagtgggtgctcgtatag

SEQ ID NO: 266069 - DNA, 25 bp, Probe sequence
gagcgtattcgcaatagttatcaat

SEQ ID NO: 266070 - DNA, 25 bp, Probe sequence
gatgattttaatacagctaatgcaa

SEQ ID NO: 266071 - DNA, 25 bp, Probe sequence
gatttacaatttccacatcatgaaa

SEQ ID NO: 266072 - DNA, 25 bp, Probe sequence
gtactagagaacacaacatcaacag

SEQ ID NO: 266073 - DNA, 25 bp, Probe sequence
gtaaaaatgtatgtatgtggtccta

SEQ ID NO: 266074 - DNA, 25 bp, Probe sequence
gtgagacgttactttgaataccaag

SEQ ID NO: 266075 - DNA, 25 bp, Probe sequence
gtgggtgctcgtatagatgcaggag

SEQ ID NO: 266076 - DNA, 25 bp, Probe sequence
gtggtggcgatgtttactttagaac

SEQ ID NO: 266077 - DNA, 25 bp, Probe sequence
ggtaaattaagtcatcaatccatag

SEQ ID NO: 266078 - DNA, 25 bp, Probe sequence
ggttatgcatatgaaagtggtggcg

SEQ ID NO: 266079 - DNA, 25 bp, Probe sequence
ggaccatatggatgacattattcaa

SEQ ID NO: 266080 - DNA, 25 bp, Probe sequence
ggaaaaaagcgaagcctggcgagat

SEQ ID NO: 266081 - DNA, 25 bp, Probe sequence
tcagcgatgttttaggtgtaccgtt

SEQ ID NO: 266082 - DNA, 25 bp, Probe sequence
tacattatataatacgcttacacgt

SEQ ID NO: 266083 - DNA, 25 bp, Probe sequence
atctgccaaaagtcaggcgcaaacg

SEQ ID NO: 266084 - DNA, 25 bp, Probe sequence
atgtatctgccaaaagtcaggcgca

SEQ ID NO: 266085 - DNA, 25 bp, Probe sequence
agaacgattagaggcattattaaat

SEQ ID NO: 266086 - DNA, 25 bp, Probe sequence
agcgatagaagcagtgataggtttt

SEQ ID NO: 266087 - DNA, 25 bp, Probe sequence
agcatatatgggagacgcagtctta

SEQ ID NO: 266088 - DNA, 25 bp, Probe sequence
agcctaataaactacatcaaatgtc

SEQ ID NO: 266089 - DNA, 25 bp, Probe sequence
aaagtcaggcgcaaacgttagaata

SEQ ID NO: 266090 - DNA, 25 bp, Probe sequence
aaaaatatgtatctgccaaaagtca

SEQ ID NO: 266091 - DNA, 25 bp, Probe sequence
aacgcgaaaagtcatactaaagcta

SEQ ID NO: 266092 - DNA, 25 bp, Probe sequence
aagtaagcctaataaactacatcaa

SEQ ID NO: 266093 - DNA, 25 bp, Probe sequence
aatggagcaagaatggtttacagac

SEQ ID NO: 266094 - DNA, 25 bp, Probe sequence
aatcacattaaattattgaatccat

SEQ ID NO: 266095 - DNA, 25 bp, Probe sequence
aattattgaatccattgaccttagc

SEQ ID NO: 266096 - DNA, 25 bp, Probe sequence
cagtgataggttttctttatttaga

SEQ ID NO: 266097 - DNA, 25 bp, Probe sequence
cagtcttagatcaatatgtacgtac

SEQ ID NO: 266098 - DNA, 25 bp, Probe sequence
ccaaaagtcaggcgcaaacgttaga

SEQ ID NO: 266099 - DNA, 25 bp, Probe sequence
cgtaaaagttcagcgatagaagcag

SEQ ID NO: 266100 - DNA, 25 bp, Probe sequence
gaatccattgaccttagcatatatg

SEQ ID NO: 266101 - DNA, 25 bp, Probe sequence
gaatggtttacagacgaagaaatgg

SEQ ID NO: 266102 - DNA, 25 bp, Probe sequence
gaagcagtgataggttttctttatt

SEQ ID NO: 266103 - DNA, 25 bp, Probe sequence
gacgcagtcttagatcaatatgtac

SEQ ID NO: 266104 - DNA, 25 bp, Probe sequence
gaccttagcatatatgggagacgca

SEQ ID NO: 266105 - DNA, 25 bp, Probe sequence
gagggcgtaacgcgaaaagtcatac

SEQ ID NO: 266106 - DNA, 25 bp, Probe sequence
gagaagaacgattagaggcattatt

SEQ ID NO: 266107 - DNA, 25 bp, Probe sequence
gatgttcaaacatatcgtaaaagtt

SEQ ID NO: 266108 - DNA, 25 bp, Probe sequence
gtatctgccaaaagtcaggcgcaaa

SEQ ID NO: 266109 - DNA, 25 bp, Probe sequence
gtcaggcgcaaacgttagaatattt

SEQ ID NO: 266110 - DNA, 25 bp, Probe sequence
ggataatcaacaagataatcacatt

SEQ ID NO: 266111 - DNA, 25 bp, Probe sequence
ggagacgcagtcttagatcaatatg

SEQ ID NO: 266112 - DNA, 25 bp, Probe sequence
ggagcaagaatggtttacagacgaa

SEQ ID NO: 266113 - DNA, 25 bp, Probe sequence
ggcgtaacgcgaaaagtcatactaa

SEQ ID NO: 266114 - DNA, 25 bp, Probe sequence
ggcgcaaacgttagaatatttaatg

SEQ ID NO: 266115 - DNA, 25 bp, Probe sequence
tattgaatccattgaccttagcata

SEQ ID NO: 266116 - DNA, 25 bp, Probe sequence
ttgaatccattgaccttagcatata

SEQ ID NO: 266117 - DNA, 25 bp, Probe sequence
atcagttcactggtttaagcaatgg

SEQ ID NO: 266118 - DNA, 25 bp, Probe sequence
acagctagtcaatctactacacaaa

SEQ ID NO: 266119 - DNA, 25 bp, Probe sequence
aacaccagccggttatacaccgaca

SEQ ID NO: 266120 - DNA, 25 bp, Probe sequence
aatggtaaataccgctttgataatt

SEQ ID NO: 266121 - DNA, 25 bp, Probe sequence
aatcaccacaaaacgctacagctag

SEQ ID NO: 266122 - DNA, 25 bp, Probe sequence
aatatggtcaatatttccgtccagg

SEQ ID NO: 266123 - DNA, 25 bp, Probe sequence
caaatgtgaatggctcatcaactgc

SEQ ID NO: 266124 - DNA, 25 bp, Probe sequence
cacacttgataatggctactacgaa

SEQ ID NO: 266125 - DNA, 25 bp, Probe sequence
cagacagcgactcagattcagacag

SEQ ID NO: 266126 - DNA, 25 bp, Probe sequence
cagattcagacagcgactcagattc

SEQ ID NO: 266127 - DNA, 25 bp, Probe sequence
ctagtagtaacatgcaatcaccaca

SEQ ID NO: 266128 - DNA, 25 bp, Probe sequence
ctgcttcaattttagtagggacaac

SEQ ID NO: 266129 - DNA, 25 bp, Probe sequence
gccgatggtggcgaagttgatgtaa

SEQ ID NO: 266130 - DNA, 25 bp, Probe sequence
gcaactgcagatcagcctaaagtga

SEQ ID NO: 266131 - DNA, 25 bp, Probe sequence
gaattttgggcaacttcaagtgatg

SEQ ID NO: 266132 - DNA, 25 bp, Probe sequence
gaagctaaagcggcagaacatacga

SEQ ID NO: 266133 - DNA, 25 bp, Probe sequence
gaaaagcctgctggtttaactcaaa

SEQ ID NO: 266134 - DNA, 25 bp, Probe sequence
gaaacgacagccccaagtgagaata

SEQ ID NO: 266135 - DNA, 25 bp, Probe sequence
gacaatacgcaaactgcaactgcag

SEQ ID NO: 266136 - DNA, 25 bp, Probe sequence
gagggcgatacatttacttttaaat

SEQ ID NO: 266137 - DNA, 25 bp, Probe sequence
gatgatgctgtagattctgatggac

SEQ ID NO: 266138 - DNA, 25 bp, Probe sequence
gatagcgattcagattcagatgcag

SEQ ID NO: 266139 - DNA, 25 bp, Probe sequence
gatagcgattcagattcagacagcg

SEQ ID NO: 266140 - DNA, 25 bp, Probe sequence
gtattctgtaggtactgcttcaatt

SEQ ID NO: 266141 - DNA, 25 bp, Probe sequence
gtagctttgaacaagtcgcatttgc

SEQ ID NO: 266142 - DNA, 25 bp, Probe sequence
ggatcatgatgatttcacacttgat

SEQ ID NO: 266143 - DNA, 25 bp, Probe sequence
ggactaactacaacaggtgtcatta

SEQ ID NO: 266144 - DNA, 25 bp, Probe sequence
tgtagagttttcaacaccagccggt

SEQ ID NO: 266145 - DNA, 25 bp, Probe sequence
tcgcggcattaggatcattattgtt

SEQ ID NO: 266146 - DNA, 25 bp, Probe sequence
tcattattgttattcggtcgtcgta

SEQ ID NO: 266147 - DNA, 25 bp, Probe sequence
taagattaccttcacaaactcaaaa

SEQ ID NO: 266148 - DNA, 25 bp, Probe sequence
tatacaccgacaactgcaaatgcag

SEQ ID NO: 266149 - DNA, 25 bp, Probe sequence
tattcggtggattattcgcggcatt

SEQ ID NO: 266150 - DNA, 25 bp, Probe sequence
tttcaccccagatacttcaaaactt

SEQ ID NO: 266151 - DNA, 25 bp, Probe sequence
attcagattcagacagcgactcaga

SEQ ID NO: 266152 - DNA, 25 bp, Probe sequence
atagcgactcagactcagatagcga

SEQ ID NO: 266153 - DNA, 25 bp, Probe sequence
agcacaaccgcttatttcaagtaca

SEQ ID NO: 266154 - DNA, 25 bp, Probe sequence
agcgactcagactcagatagcgact

SEQ ID NO: 266155 - DNA, 25 bp, Probe sequence
actcagactcagatagcgactcaga

SEQ ID NO: 266156 - DNA, 25 bp, Probe sequence
acagcgattcagacagcgactcaga

SEQ ID NO: 266157 - DNA, 25 bp, Probe sequence
aaaacctgctggcttaactcaaaca

SEQ ID NO: 266158 - DNA, 25 bp, Probe sequence
caatcaccacaaaacgctacagcta

SEQ ID NO: 266159 - DNA, 25 bp, Probe sequence
cagccggttatacaccgacaactgc

SEQ ID NO: 266160 - DNA, 25 bp, Probe sequence
cagactcggatagcgactcagactc

SEQ ID NO: 266161 - DNA, 25 bp, Probe sequence
cagactcagatagcgactcagattc

SEQ ID NO: 266162 - DNA, 25 bp, Probe sequence
ctcagacagcgactcagactcagac

SEQ ID NO: 266163 - DNA, 25 bp, Probe sequence
cggactcagacaacgactcagattc

SEQ ID NO: 266164 - DNA, 25 bp, Probe sequence
gcgactcagactcggatagcgattc

SEQ ID NO: 266165 - DNA, 25 bp, Probe sequence
gcgactcagactcagatagcgattc

SEQ ID NO: 266166 - DNA, 25 bp, Probe sequence
gcgactcagattcggatagcgactc

SEQ ID NO: 266167 - DNA, 25 bp, Probe sequence
gcgattcagactcagatagcgactc

SEQ ID NO: 266168 - DNA, 25 bp, Probe sequence
gcgactcagactcagatagcgactc

SEQ ID NO: 266169 - DNA, 25 bp, Probe sequence
gcgactcagattcagatagcgactc

SEQ ID NO: 266170 - DNA, 25 bp, Probe sequence
gcgactcagattcagacagcgattc

SEQ ID NO: 266171 - DNA, 25 bp, Probe sequence
gctacagctaatcaatctactacaa

SEQ ID NO: 266172 - DNA, 25 bp, Probe sequence
gcagtgaatactgttgcagctccac

SEQ ID NO: 266173 - DNA, 25 bp, Probe sequence
gaaacgacagccccaagtgagaata

SEQ ID NO: 266174 - DNA, 25 bp, Probe sequence
gacagcgattcagactcagacagcg

SEQ ID NO: 266175 - DNA, 25 bp, Probe sequence
gactcagattcagatagcgactcag

SEQ ID NO: 266176 - DNA, 25 bp, Probe sequence
gatgcaggtaaacatactccggcta

SEQ ID NO: 266177 - DNA, 25 bp, Probe sequence
gatagcgattcggactcagacagtg

SEQ ID NO: 266178 - DNA, 25 bp, Probe sequence
gattcagacagcgactcagattcag

SEQ ID NO: 266179 - DNA, 25 bp, Probe sequence
ggtcaatatttccgtccaggatcag

SEQ ID NO: 266180 - DNA, 25 bp, Probe sequence
ggctcatcaactgctaatggcgacc

SEQ ID NO: 266181 - DNA, 25 bp, Probe sequence
tcagacagcgactcagactcagaca

SEQ ID NO: 266182 - DNA, 25 bp, Probe sequence
tagagttttcaacaccagccggtta

SEQ ID NO: 266183 - DNA, 25 bp, Probe sequence
tagtttcacccctgatacttcaaaa

SEQ ID NO: 266184 - DNA, 25 bp, Probe sequence
tattcggtggattattcgcggcatt

SEQ ID NO: 266185 - DNA, 25 bp, Probe sequence
atcattattgttattcggtcgtcgt

SEQ ID NO: 266186 - DNA, 25 bp, Probe sequence
agattcagacagcgactcagattca

SEQ ID NO: 266187 - DNA, 25 bp, Probe sequence
agcgactcagactcagatagcgact

SEQ ID NO: 266188 - DNA, 25 bp, Probe sequence
acagcgattcagacagcgactcaga

SEQ ID NO: 266189 - DNA, 25 bp, Probe sequence
aaaacctgctggcttaactcaaaca

SEQ ID NO: 266190 - DNA, 25 bp, Probe sequence
caatcaccacaaaacgctacagcta

SEQ ID NO: 266191 - DNA, 25 bp, Probe sequence
cagactcagacagcgattcagactc

SEQ ID NO: 266192 - DNA, 25 bp, Probe sequence
cggactcagacaacgactcagattc

SEQ ID NO: 266193 - DNA, 25 bp, Probe sequence
gcgactcagactcggatagcgattc

SEQ ID NO: 266194 - DNA, 25 bp, Probe sequence
gcgactcagactcagatagcgattc

SEQ ID NO: 266195 - DNA, 25 bp, Probe sequence
gcgactcagattcagacagcgattc

SEQ ID NO: 266196 - DNA, 25 bp, Probe sequence
gcgattcagactcagacagcgattc

SEQ ID NO: 266197 - DNA, 25 bp, Probe sequence
gcgactcagactcagatagcgactc

SEQ ID NO: 266198 - DNA, 25 bp, Probe sequence
gcgactcagattcagatagcgactc

SEQ ID NO: 266199 - DNA, 25 bp, Probe sequence
gcgattcagactcagatagcgactc

SEQ ID NO: 266200 - DNA, 25 bp, Probe sequence
gcagtgaatactgttgcagctccac

SEQ ID NO: 266201 - DNA, 25 bp, Probe sequence
gaaacgacagccccaagtgagaata

SEQ ID NO: 266202 - DNA, 25 bp, Probe sequence
gacagcgattcagactcagacagcg

SEQ ID NO: 266203 - DNA, 25 bp, Probe sequence
gactcagactcagatagcgactcag

SEQ ID NO: 266204 - DNA, 25 bp, Probe sequence
gatgcaggtaaacatactccggcta

SEQ ID NO: 266205 - DNA, 25 bp, Probe sequence
gatagcgactcagattcggacagcg

SEQ ID NO: 266206 - DNA, 25 bp, Probe sequence
gatagcgattcggactcagacagtg

SEQ ID NO: 266207 - DNA, 25 bp, Probe sequence
gatagcgattcggactcagacaacg

SEQ ID NO: 266208 - DNA, 25 bp, Probe sequence
gattcagacagcgactcagattcag

SEQ ID NO: 266209 - DNA, 25 bp, Probe sequence
gattcagactcagatagcgactcag

SEQ ID NO: 266210 - DNA, 25 bp, Probe sequence
ggtcaatatttccgtccaggatcag

SEQ ID NO: 266211 - DNA, 25 bp, Probe sequence
ggatagcgactcagactcagatagc

SEQ ID NO: 266212 - DNA, 25 bp, Probe sequence
ggacagcgattcagactcagatagc

SEQ ID NO: 266213 - DNA, 25 bp, Probe sequence
ggctcatcaactgctaatggcgacc

SEQ ID NO: 266214 - DNA, 25 bp, Probe sequence
tcagacagcgactcagactcagaca

SEQ ID NO: 266215 - DNA, 25 bp, Probe sequence
tagagttttcaacaccagccggtta

SEQ ID NO: 266216 - DNA, 25 bp, Probe sequence
tagtttcacccctgatacttcaaaa

SEQ ID NO: 266217 - DNA, 25 bp, Probe sequence
tattcggtggattattcgcggcatt

SEQ ID NO: 266218 - DNA, 25 bp, Probe sequence
ttcagacagcgactcagactcagac

SEQ ID NO: 266219 - DNA, 25 bp, Probe sequence
atcacgaaatatgactgtttatgta

SEQ ID NO: 266220 - DNA, 25 bp, Probe sequence
atgcaggaactgatgatgctgtaga

SEQ ID NO: 266221 - DNA, 25 bp, Probe sequence
aggacatgtcaattctacaacaggt

SEQ ID NO: 266222 - DNA, 25 bp, Probe sequence
agaaactactgaagaacctcaaaat

SEQ ID NO: 266223 - DNA, 25 bp, Probe sequence
agcagggtacacaccaactactgta

SEQ ID NO: 266224 - DNA, 25 bp, Probe sequence
actttaggtaatgatgcgtatagcg

SEQ ID NO: 266225 - DNA, 25 bp, Probe sequence
acagtgtagaattttcaacgctagc

SEQ ID NO: 266226 - DNA, 25 bp, Probe sequence
acagttggtcgaacagttattcaag

SEQ ID NO: 266227 - DNA, 25 bp, Probe sequence
aaattcaaaatcacatacagcaatg

SEQ ID NO: 266228 - DNA, 25 bp, Probe sequence
aactgaattttgggcgacttctagt

SEQ ID NO: 266229 - DNA, 25 bp, Probe sequence
aacctcaaaatacaacttctacaca

SEQ ID NO: 266230 - DNA, 25 bp, Probe sequence
aagataatttagcggctcaaaatat

SEQ ID NO: 266231 - DNA, 25 bp, Probe sequence
aagtgtaaacggctcatcaactgct

SEQ ID NO: 266232 - DNA, 25 bp, Probe sequence
aatgaagcgacagctccaagtgaga

SEQ ID NO: 266233 - DNA, 25 bp, Probe sequence
aatgagtctgataatacttcagtta

SEQ ID NO: 266234 - DNA, 25 bp, Probe sequence
caatttgttgatagctttacacctg

SEQ ID NO: 266235 - DNA, 25 bp, Probe sequence
cacaccaactactgtaaatgcagga

SEQ ID NO: 266236 - DNA, 25 bp, Probe sequence
ctcaaaatatttcaacgcaggctaa

SEQ ID NO: 266237 - DNA, 25 bp, Probe sequence
gcaacagttgatttaatgaatggtc

SEQ ID NO: 266238 - DNA, 25 bp, Probe sequence
gaattagatcgtactactactgatg

SEQ ID NO: 266239 - DNA, 25 bp, Probe sequence
gatagctttacacctgatacttcaa

SEQ ID NO: 266240 - DNA, 25 bp, Probe sequence
gattgggaaatgggacttacagtgt

SEQ ID NO: 266241 - DNA, 25 bp, Probe sequence
gtagcagcaccacaacaaggtacaa

SEQ ID NO: 266242 - DNA, 25 bp, Probe sequence
gggcgacttctagtgatgttttaaa

SEQ ID NO: 266243 - DNA, 25 bp, Probe sequence
ggctaatgatgtttcagctactcct

SEQ ID NO: 266244 - DNA, 25 bp, Probe sequence
tgaacaaagtacaacgtcaaaccaa

SEQ ID NO: 266245 - DNA, 25 bp, Probe sequence
tgaacacagtagcagcaccacaaca

SEQ ID NO: 266246 - DNA, 25 bp, Probe sequence
tccgggttctgtaagattaccttca

SEQ ID NO: 266247 - DNA, 25 bp, Probe sequence
tcaacgctagcagggtacacaccaa

SEQ ID NO: 266248 - DNA, 25 bp, Probe sequence
tacaacttctacacaaccaactaaa

SEQ ID NO: 266249 - DNA, 25 bp, Probe sequence
tatggacagtatttccgtccgggtt

SEQ ID NO: 266250 - DNA, 25 bp, Probe sequence
tatttccgtccgggttctgtaagat

SEQ ID NO: 266251 - DNA, 25 bp, Probe sequence
ttaaaccgtatggctgtgaacacag

SEQ ID NO: 266252 - DNA, 25 bp, Probe sequence
ttcagctactcctaaaacaacgact

SEQ ID NO: 266253 - DNA, 25 bp, Probe sequence
attttggtgatattacatcagcata

SEQ ID NO: 266254 - DNA, 25 bp, Probe sequence
atagcaaaacgattgtaccagccca

SEQ ID NO: 266255 - DNA, 25 bp, Probe sequence
atcgtgttcctgaaggatatacatt

SEQ ID NO: 266256 - DNA, 25 bp, Probe sequence
agatgttccttttagtgtaactatt

SEQ ID NO: 266257 - DNA, 25 bp, Probe sequence
acagcagatatcacttatccggctt

SEQ ID NO: 266258 - DNA, 25 bp, Probe sequence
acaactacaacagcagatatcactt

SEQ ID NO: 266259 - DNA, 25 bp, Probe sequence
acaaccaaactcaacagattctaaa

SEQ ID NO: 266260 - DNA, 25 bp, Probe sequence
aaaaatatatcgtgttcctgaagga

SEQ ID NO: 266261 - DNA, 25 bp, Probe sequence
aagtgttaatcttgattttggtgat

SEQ ID NO: 266262 - DNA, 25 bp, Probe sequence
aatgatttggtagacgtaactgatg

SEQ ID NO: 266263 - DNA, 25 bp, Probe sequence
aatgggtattaattactcaatttat

SEQ ID NO: 266264 - DNA, 25 bp, Probe sequence
aattcaataggatcagcttttacag

SEQ ID NO: 266265 - DNA, 25 bp, Probe sequence
caaaacgattgtaccagcccaagat

SEQ ID NO: 266266 - DNA, 25 bp, Probe sequence
gcagatacaattcctgttgacaaga

SEQ ID NO: 266267 - DNA, 25 bp, Probe sequence
gaatgcgtatggcagcaatacaacc

SEQ ID NO: 266268 - DNA, 25 bp, Probe sequence
gaagcgtaccatccgaaatatccaa

SEQ ID NO: 266269 - DNA, 25 bp, Probe sequence
gaaatatccaactaatattggtcaa

SEQ ID NO: 266270 - DNA, 25 bp, Probe sequence
gagacagtttctcatgtaggaaatg

SEQ ID NO: 266271 - DNA, 25 bp, Probe sequence
gatcagcttttacagagacagtttc

SEQ ID NO: 266272 - DNA, 25 bp, Probe sequence
gatatcacttatccggcttataaag

SEQ ID NO: 266273 - DNA, 25 bp, Probe sequence
gttaaaagttgaagcgtaccatccg

SEQ ID NO: 266274 - DNA, 25 bp, Probe sequence
gtaccatccgaaatatccaactaat

SEQ ID NO: 266275 - DNA, 25 bp, Probe sequence
ggtagacgtaactgatgaatttaaa

SEQ ID NO: 266276 - DNA, 25 bp, Probe sequence
ggtagtatatgttaatcctatggat

SEQ ID NO: 266277 - DNA, 25 bp, Probe sequence
ggatatgacgttaatactaatgatt

SEQ ID NO: 266278 - DNA, 25 bp, Probe sequence
ggatcaaatcaaagtgttaatcttg

SEQ ID NO: 266279 - DNA, 25 bp, Probe sequence
ggatgcagatacaattcctgttgac

SEQ ID NO: 266280 - DNA, 25 bp, Probe sequence
ggaaatgttgaagaccctggttact

SEQ ID NO: 266281 - DNA, 25 bp, Probe sequence
ggaaatcaaattacaactacaacag

SEQ ID NO: 266282 - DNA, 25 bp, Probe sequence
ggcagcaatacaaccaaactcaaca

SEQ ID NO: 266283 - DNA, 25 bp, Probe sequence
tgttgaagaccctggttactataac

SEQ ID NO: 266284 - DNA, 25 bp, Probe sequence
tcctgttgacaagaaagatgttcct

SEQ ID NO: 266285 - DNA, 25 bp, Probe sequence
tacatcagcatatgttgtaatggtt

SEQ ID NO: 266286 - DNA, 25 bp, Probe sequence
tatccggcttataaagaagctgaca

SEQ ID NO: 266287 - DNA, 25 bp, Probe sequence
atagcgactcagactcagacagcga

SEQ ID NO: 266288 - DNA, 25 bp, Probe sequence
atcattattgttattcggtcgtcgt

SEQ ID NO: 266289 - DNA, 25 bp, Probe sequence
agatagcgactcagattcagacagc

SEQ ID NO: 266290 - DNA, 25 bp, Probe sequence
agcgactcagattcagacagcgact

SEQ ID NO: 266291 - DNA, 25 bp, Probe sequence
acggcttatcttcagttattacagt

SEQ ID NO: 266292 - DNA, 25 bp, Probe sequence
acaccatcaggttacacaccaacac

SEQ ID NO: 266293 - DNA, 25 bp, Probe sequence
acagcgactcagactcagatgcagg

SEQ ID NO: 266294 - DNA, 25 bp, Probe sequence
aatggctactttatcttcaacaggt

SEQ ID NO: 266295 - DNA, 25 bp, Probe sequence
aatccgtttctactggcaatgcttt

SEQ ID NO: 266296 - DNA, 25 bp, Probe sequence
caagcttaccactcaagttatccta

SEQ ID NO: 266297 - DNA, 25 bp, Probe sequence
cagaaggctatacaccgactacagt

SEQ ID NO: 266298 - DNA, 25 bp, Probe sequence
cagacagcgactcagactcagatag

SEQ ID NO: 266299 - DNA, 25 bp, Probe sequence
ctcagacagcgactcagactcagat

SEQ ID NO: 266300 - DNA, 25 bp, Probe sequence
cggactcagatagcgactcagattc

SEQ ID NO: 266301 - DNA, 25 bp, Probe sequence
gcgactcagattcggacagcgactc

SEQ ID NO: 266302 - DNA, 25 bp, Probe sequence
gcgactcagattcggatagcgactc

SEQ ID NO: 266303 - DNA, 25 bp, Probe sequence
gcgattcagactcagacagcgactc

SEQ ID NO: 266304 - DNA, 25 bp, Probe sequence
gacagcgactcagactcggatagtg

SEQ ID NO: 266305 - DNA, 25 bp, Probe sequence
gacagcgactcagattcagacagcg

SEQ ID NO: 266306 - DNA, 25 bp, Probe sequence
gactcagatagcgactcagattcag

SEQ ID NO: 266307 - DNA, 25 bp, Probe sequence
gactcagatagcgactcagactcag

SEQ ID NO: 266308 - DNA, 25 bp, Probe sequence
gcgactcagattcagacagcgactc

SEQ ID NO: 266309 - DNA, 25 bp, Probe sequence
gagcaagcttcaccaaaatctacga

SEQ ID NO: 266310 - DNA, 25 bp, Probe sequence
gatagcgactcagattcggacagcg

SEQ ID NO: 266311 - DNA, 25 bp, Probe sequence
gatactattgactctggtttctaca

SEQ ID NO: 266312 - DNA, 25 bp, Probe sequence
gattcagactcagatagcgactcag

SEQ ID NO: 266313 - DNA, 25 bp, Probe sequence
ggtaagcacacacctgttaaaccaa

SEQ ID NO: 266314 - DNA, 25 bp, Probe sequence
ggacagcgactcagattcagacaga

SEQ ID NO: 266315 - DNA, 25 bp, Probe sequence
tcgtaccagcccaagattatttatc

SEQ ID NO: 266316 - DNA, 25 bp, Probe sequence
tcagacagcgactcagactcagaca

SEQ ID NO: 266317 - DNA, 25 bp, Probe sequence
tagcagcagtacagccatcatcaac

SEQ ID NO: 266318 - DNA, 25 bp, Probe sequence
tagcgactcagattcagacagcgac

SEQ ID NO: 266319 - DNA, 25 bp, Probe sequence
tagcgaaagcccaacacttgttcaa

SEQ ID NO: 266320 - DNA, 25 bp, Probe sequence
ttcggacagcgattcagactcagat

SEQ ID NO: 266321 - DNA, 25 bp, Probe sequence
attcggacagcgactcagactctga

SEQ ID NO: 266322 - DNA, 25 bp, Probe sequence
atagcgactcagattcagacagcga

SEQ ID NO: 266323 - DNA, 25 bp, Probe sequence
agactcagatagcgactcagactca

SEQ ID NO: 266324 - DNA, 25 bp, Probe sequence
acggcttatcttcagttattacagt

SEQ ID NO: 266325 - DNA, 25 bp, Probe sequence
acaccatcaggttacacaccaacac

SEQ ID NO: 266326 - DNA, 25 bp, Probe sequence
aatggctactttatcttcaacaggt

SEQ ID NO: 266327 - DNA, 25 bp, Probe sequence
aatccgtttctactggcaatgcttt

SEQ ID NO: 266328 - DNA, 25 bp, Probe sequence
caagcttaccactcaagttatccta

SEQ ID NO: 266329 - DNA, 25 bp, Probe sequence
cagaaggctatacaccgactacagt

SEQ ID NO: 266330 - DNA, 25 bp, Probe sequence
cagattcagacagcgactcagactc

SEQ ID NO: 266331 - DNA, 25 bp, Probe sequence
ctcagacagcgactcagactcagac

SEQ ID NO: 266332 - DNA, 25 bp, Probe sequence
gcgactcagattcagacagcgattc

SEQ ID NO: 266333 - DNA, 25 bp, Probe sequence
gcgattcagactcagacagcgactc

SEQ ID NO: 266334 - DNA, 25 bp, Probe sequence
gcgattcagactcagatagcgactc

SEQ ID NO: 266335 - DNA, 25 bp, Probe sequence
gcgactcagattcagatagcgactc

SEQ ID NO: 266336 - DNA, 25 bp, Probe sequence
gcgattcggactcagatagcgactc

SEQ ID NO: 266337 - DNA, 25 bp, Probe sequence
gacagcgattcagactcggatgcag

SEQ ID NO: 266338 - DNA, 25 bp, Probe sequence
gacagcgactcagattcagatagcg

SEQ ID NO: 266339 - DNA, 25 bp, Probe sequence
gactcagacagcgattcagactcag

SEQ ID NO: 266340 - DNA, 25 bp, Probe sequence
gactcagacagcgactcagattcag

SEQ ID NO: 266341 - DNA, 25 bp, Probe sequence
gactcagatagcgactcagactcag

SEQ ID NO: 266342 - DNA, 25 bp, Probe sequence
gactcagactcagatagcgactcag

SEQ ID NO: 266343 - DNA, 25 bp, Probe sequence
gagcaagcttcaccaaaatctacga

SEQ ID NO: 266344 - DNA, 25 bp, Probe sequence
gatactattgactctggtttctaca

SEQ ID NO: 266345 - DNA, 25 bp, Probe sequence
gatagcgactcagactcagacagtg

SEQ ID NO: 266346 - DNA, 25 bp, Probe sequence
gatagcgattcggactcagacagcg

SEQ ID NO: 266347 - DNA, 25 bp, Probe sequence
gattcagattcagacagcgactcag

SEQ ID NO: 266348 - DNA, 25 bp, Probe sequence
ggttcattattgttattcggtcgtc

SEQ ID NO: 266349 - DNA, 25 bp, Probe sequence
ggacagcgattcagactcagatagc

SEQ ID NO: 266350 - DNA, 25 bp, Probe sequence
tcgtaccagcccaagattatttatc

SEQ ID NO: 266351 - DNA, 25 bp, Probe sequence
tcagacagcgactcagactcagaca

SEQ ID NO: 266352 - DNA, 25 bp, Probe sequence
tagcagcagtacagccatcatcaac

SEQ ID NO: 266353 - DNA, 25 bp, Probe sequence
tagcgactcagattcggacagcgat

SEQ ID NO: 266354 - DNA, 25 bp, Probe sequence
tagcgaaagcccaacacttgttcaa

SEQ ID NO: 266355 - DNA, 25 bp, Probe sequence
attcagactcagatagcgactcaga

SEQ ID NO: 266356 - DNA, 25 bp, Probe sequence
atagcgactcagactcagacagcga

SEQ ID NO: 266357 - DNA, 25 bp, Probe sequence
atcattattgttattcggtcgtcgt

SEQ ID NO: 266358 - DNA, 25 bp, Probe sequence
agcgactcagattcagacagcgact

SEQ ID NO: 266359 - DNA, 25 bp, Probe sequence
acggcttatcttcagttattacagt

SEQ ID NO: 266360 - DNA, 25 bp, Probe sequence
acaccatcaggttacacaccaacac

SEQ ID NO: 266361 - DNA, 25 bp, Probe sequence
acagcgactcagactcagatgcagg

SEQ ID NO: 266362 - DNA, 25 bp, Probe sequence
acagcgactcagactcggatagtga

SEQ ID NO: 266363 - DNA, 25 bp, Probe sequence
gcgactcagattcggacagcgactc

SEQ ID NO: 266364 - DNA, 25 bp, Probe sequence
aatggctactttatcttcaacaggt

SEQ ID NO: 266365 - DNA, 25 bp, Probe sequence
aatccgtttctactggcaatgcttt

SEQ ID NO: 266366 - DNA, 25 bp, Probe sequence
aattcaattggatcagcgttcactg

SEQ ID NO: 266367 - DNA, 25 bp, Probe sequence
caagcttaccactcaagttatccta

SEQ ID NO: 266368 - DNA, 25 bp, Probe sequence
cagaaggctatacaccgactacagt

SEQ ID NO: 266369 - DNA, 25 bp, Probe sequence
gcgactcagactcagatagcgattc

SEQ ID NO: 266370 - DNA, 25 bp, Probe sequence
gcgactcagattcggatagcgactc

SEQ ID NO: 266371 - DNA, 25 bp, Probe sequence
gcgattcagactcagacagcgactc

SEQ ID NO: 266372 - DNA, 25 bp, Probe sequence
gcgattcagattcagacagcgattc

SEQ ID NO: 266373 - DNA, 25 bp, Probe sequence
gcgactcagattcagacagcgactc

SEQ ID NO: 266374 - DNA, 25 bp, Probe sequence
gaagcgttacaacctgatttgcaag

SEQ ID NO: 266375 - DNA, 25 bp, Probe sequence
gacagcgactcagattcagacagcg

SEQ ID NO: 266376 - DNA, 25 bp, Probe sequence
gagcaagcttcaccaaaatctacga

SEQ ID NO: 266377 - DNA, 25 bp, Probe sequence
gagacaccatcaggttatacaccaa

SEQ ID NO: 266378 - DNA, 25 bp, Probe sequence
gatactattgactctggtttctaca

SEQ ID NO: 266379 - DNA, 25 bp, Probe sequence
gattcagactcagatagcgactcag

SEQ ID NO: 266380 - DNA, 25 bp, Probe sequence
gggtcatacttgattccaaacttac

SEQ ID NO: 266381 - DNA, 25 bp, Probe sequence
ggtaagcacacacctgttaaaccaa

SEQ ID NO: 266382 - DNA, 25 bp, Probe sequence
ggacagcgactcagattcagacaga

SEQ ID NO: 266383 - DNA, 25 bp, Probe sequence
tcgtaccagcccaagattatttatc

SEQ ID NO: 266384 - DNA, 25 bp, Probe sequence
tcagacagcgactcagactcagata

SEQ ID NO: 266385 - DNA, 25 bp, Probe sequence
tagcagcagtacagccatcatcaac

SEQ ID NO: 266386 - DNA, 25 bp, Probe sequence
tagcgaaagcccaacacttgttcaa

SEQ ID NO: 266387 - DNA, 25 bp, Probe sequence
tatacaccaacttcagtaacttctg

SEQ ID NO: 266388 - DNA, 25 bp, Probe sequence
ttcagactcagatagcgactcagat

SEQ ID NO: 266389 - DNA, 25 bp, Probe sequence
attatctagaattaaaatcacaaat

SEQ ID NO: 266390 - DNA, 25 bp, Probe sequence
atttacagattatgtcgatagattt

SEQ ID NO: 266391 - DNA, 25 bp, Probe sequence
atagtaaatctgcctcaatgggtaa

SEQ ID NO: 266392 - DNA, 25 bp, Probe sequence
atctgcctcaatgggtaatgcttta

SEQ ID NO: 266393 - DNA, 25 bp, Probe sequence
atcgtaccagcacaagattatctag

SEQ ID NO: 266394 - DNA, 25 bp, Probe sequence
atgggtaatgctttaggattcacta

SEQ ID NO: 266395 - DNA, 25 bp, Probe sequence
atggttacattaagttcaaacaata

SEQ ID NO: 266396 - DNA, 25 bp, Probe sequence
agtaaatctgcctcaatgggtaatg

SEQ ID NO: 266397 - DNA, 25 bp, Probe sequence
accagcacaagattatctagaatta

SEQ ID NO: 266398 - DNA, 25 bp, Probe sequence
acaatagtaaatctgcctcaatggg

SEQ ID NO: 266399 - DNA, 25 bp, Probe sequence
aaatctgcctcaatgggtaatgctt

SEQ ID NO: 266400 - DNA, 25 bp, Probe sequence
aaacaatagtaaatctgcctcaatg

SEQ ID NO: 266401 - DNA, 25 bp, Probe sequence
aacaatagtaaatctgcctcaatgg

SEQ ID NO: 266402 - DNA, 25 bp, Probe sequence
aatgggtaatgctttaggattcact

SEQ ID NO: 266403 - DNA, 25 bp, Probe sequence
aatctgcctcaatgggtaatgcttt

SEQ ID NO: 266404 - DNA, 25 bp, Probe sequence
caatagtaaatctgcctcaatgggt

SEQ ID NO: 266405 - DNA, 25 bp, Probe sequence
aatagtaaatctgcctcaatgggta

SEQ ID NO: 266406 - DNA, 25 bp, Probe sequence
caatgggtaatgctttaggattcac

SEQ ID NO: 266407 - DNA, 25 bp, Probe sequence
caaacaatagtaaatctgcctcaat

SEQ ID NO: 266408 - DNA, 25 bp, Probe sequence
cacttgttcaaatggttacattaag

SEQ ID NO: 266409 - DNA, 25 bp, Probe sequence
ctgcctcaatgggtaatgctttagg

SEQ ID NO: 266410 - DNA, 25 bp, Probe sequence
cgtaccagcacaagattatctagaa

SEQ ID NO: 266411 - DNA, 25 bp, Probe sequence
cctcaatgggtaatgctttaggatt

SEQ ID NO: 266412 - DNA, 25 bp, Probe sequence
gttcaaacaatagtaaatctgcctc

SEQ ID NO: 266413 - DNA, 25 bp, Probe sequence
gtaccagcacaagattatctagaat

SEQ ID NO: 266414 - DNA, 25 bp, Probe sequence
gtaaatctgcctcaatgggtaatgc

SEQ ID NO: 266415 - DNA, 25 bp, Probe sequence
gggtaatgctttaggattcactaat

SEQ ID NO: 266416 - DNA, 25 bp, Probe sequence
ggtaatgctttaggattcactaata

SEQ ID NO: 266417 - DNA, 25 bp, Probe sequence
tgcctcaatgggtaatgctttagga

SEQ ID NO: 266418 - DNA, 25 bp, Probe sequence
tcgtaccagcacaagattatctaga

SEQ ID NO: 266419 - DNA, 25 bp, Probe sequence
tctgcctcaatgggtaatgctttag

SEQ ID NO: 266420 - DNA, 25 bp, Probe sequence
taaatctgcctcaatgggtaatgct

SEQ ID NO: 266421 - DNA, 25 bp, Probe sequence
tagtaaatctgcctcaatgggtaat

SEQ ID NO: 266422 - DNA, 25 bp, Probe sequence
tatgtcgatagatttaattctgtac

SEQ ID NO: 266423 - DNA, 25 bp, Probe sequence
attcaaacttcatcgtaacttctaa

SEQ ID NO: 266424 - DNA, 25 bp, Probe sequence
atcctatcgatattactgatccatc

SEQ ID NO: 266425 - DNA, 25 bp, Probe sequence
atgtctttagacactggtttttata

SEQ ID NO: 266426 - DNA, 25 bp, Probe sequence
agcgattcggactcggatgcaggaa

SEQ ID NO: 266427 - DNA, 25 bp, Probe sequence
agcctgctggcttaacacaaacagt

SEQ ID NO: 266428 - DNA, 25 bp, Probe sequence
accaactacacctcaagaatctaca

SEQ ID NO: 266429 - DNA, 25 bp, Probe sequence
acatacacctgttaaaccaatgagt

SEQ ID NO: 266430 - DNA, 25 bp, Probe sequence
aactaaaccagttgctacagctcca

SEQ ID NO: 266431 - DNA, 25 bp, Probe sequence
aatatacacctacatcagatggcga

SEQ ID NO: 266432 - DNA, 25 bp, Probe sequence
caactactactgatgcctcgggtaa

SEQ ID NO: 266433 - DNA, 25 bp, Probe sequence
cagctacaactgaaactaagcctca

SEQ ID NO: 266434 - DNA, 25 bp, Probe sequence
cagacagtgattcagactcagacag

SEQ ID NO: 266435 - DNA, 25 bp, Probe sequence
cagactcagatagcgactcagattc

SEQ ID NO: 266436 - DNA, 25 bp, Probe sequence
ctgatccatcaggagaggtcattgc

SEQ ID NO: 266437 - DNA, 25 bp, Probe sequence
gcacaaccagcagcagttgcttcaa

SEQ ID NO: 266438 - DNA, 25 bp, Probe sequence
gcaaccaacgccttcaaaagtagac

SEQ ID NO: 266439 - DNA, 25 bp, Probe sequence
gaatgtaattccttcggatttaaca

SEQ ID NO: 266440 - DNA, 25 bp, Probe sequence
gaaaattcacaaccgcaaccaacgc

SEQ ID NO: 266441 - DNA, 25 bp, Probe sequence
gacagcgactcagactcagatagcg

SEQ ID NO: 266442 - DNA, 25 bp, Probe sequence
gactcagacagtgattcagactcag

SEQ ID NO: 266443 - DNA, 25 bp, Probe sequence
gagtactactaaagaccatcacaat

SEQ ID NO: 266444 - DNA, 25 bp, Probe sequence
gatggtggcgaagttgacgtaacaa

SEQ ID NO: 266445 - DNA, 25 bp, Probe sequence
gattcagactcagatagcgattcgg

SEQ ID NO: 266446 - DNA, 25 bp, Probe sequence
gtatactgtaggaactgcatcgatt

SEQ ID NO: 266447 - DNA, 25 bp, Probe sequence
ggtggcgacggtactgttaaacctg

SEQ ID NO: 266448 - DNA, 25 bp, Probe sequence
ggttcattattgttattcggtcgtc

SEQ ID NO: 266449 - DNA, 25 bp, Probe sequence
ggtacgacattgatttttggtctag

SEQ ID NO: 266450 - DNA, 25 bp, Probe sequence
tgtggcagcagcgcatgacggtaaa

SEQ ID NO: 266451 - DNA, 25 bp, Probe sequence
tacccggacggtactacaaaatcag

SEQ ID NO: 266452 - DNA, 25 bp, Probe sequence
tcagatagcgactcagactcagaca

SEQ ID NO: 266453 - DNA, 25 bp, Probe sequence
tcaaacaaaaccaactacacctcaa

SEQ ID NO: 266454 - DNA, 25 bp, Probe sequence
ttcaaacattcaatctatctttaca

SEQ ID NO: 266455 - DNA, 25 bp, Probe sequence
ttgctacagctccaacaagtgttgc

SEQ ID NO: 266456 - DNA, 25 bp, Probe sequence
ttggtggattatttgcagcattagg

SEQ ID NO: 266457 - DNA, 25 bp, Probe sequence
atactacagctgatgataaagattc

SEQ ID NO: 266458 - DNA, 25 bp, Probe sequence
atcagcaaccaacactaaagttgat

SEQ ID NO: 266459 - DNA, 25 bp, Probe sequence
atcacgcttaactctatattcgtat

SEQ ID NO: 266460 - DNA, 25 bp, Probe sequence
atgagccaggaatcaaagatgttaa

SEQ ID NO: 266461 - DNA, 25 bp, Probe sequence
atgttaacccattgaaaaaatcagc

SEQ ID NO: 266462 - DNA, 25 bp, Probe sequence
atgtctttagatactggtttttaca

SEQ ID NO: 266463 - DNA, 25 bp, Probe sequence
agatataaaatcacgcttaactcta

SEQ ID NO: 266464 - DNA, 25 bp, Probe sequence
acggttaaaaatactacagctgatg

SEQ ID NO: 266465 - DNA, 25 bp, Probe sequence
acttcatcaagtactcaaaaacagc

SEQ ID NO: 266466 - DNA, 25 bp, Probe sequence
acaagccaaaatgtcactgttgatt

SEQ ID NO: 266467 - DNA, 25 bp, Probe sequence
aaagaatcaacttcatcaagtactc

SEQ ID NO: 266468 - DNA, 25 bp, Probe sequence
aaaaacagttccaaatgagacaagt

SEQ ID NO: 266469 - DNA, 25 bp, Probe sequence
aaaaatcagcaaccaacactaaagt

SEQ ID NO: 266470 - DNA, 25 bp, Probe sequence
aaaatcacgcttaactctatattcg

SEQ ID NO: 266471 - DNA, 25 bp, Probe sequence
aacttctaatgacactggcggtggc

SEQ ID NO: 266472 - DNA, 25 bp, Probe sequence
aagaaacaagccaaaatgtcactgt

SEQ ID NO: 266473 - DNA, 25 bp, Probe sequence
aagatccaatggtccatggtgattc

SEQ ID NO: 266474 - DNA, 25 bp, Probe sequence
aattaaagtgacgaagcaaacaatc

SEQ ID NO: 266475 - DNA, 25 bp, Probe sequence
caaaatgtcactgttgattatcaag

SEQ ID NO: 266476 - DNA, 25 bp, Probe sequence
ccatctacaagtgaaccatctacaa

SEQ ID NO: 266477 - DNA, 25 bp, Probe sequence
gcttaactctatattcgtatattga

SEQ ID NO: 266478 - DNA, 25 bp, Probe sequence
gaagcaaacaatcaaagttggcgat

SEQ ID NO: 266479 - DNA, 25 bp, Probe sequence
gacaagtttgaatttaacatttgct

SEQ ID NO: 266480 - DNA, 25 bp, Probe sequence
gatgcaaatgagccaggaatcaaag

SEQ ID NO: 266481 - DNA, 25 bp, Probe sequence
gattatcaagatccaatggtccatg

SEQ ID NO: 266482 - DNA, 25 bp, Probe sequence
gttaactctgatcaacaattgcctc

SEQ ID NO: 266483 - DNA, 25 bp, Probe sequence
gtaacttctaatgacactggcggtg

SEQ ID NO: 266484 - DNA, 25 bp, Probe sequence
ggtatccaagatgcaaatgagccag

SEQ ID NO: 266485 - DNA, 25 bp, Probe sequence
ggtttataaagttaactctgatcaa

SEQ ID NO: 266486 - DNA, 25 bp, Probe sequence
tctacaagtgaaccatctacaagtg

SEQ ID NO: 266487 - DNA, 25 bp, Probe sequence
tcaaatggtagttcggttactgtta

SEQ ID NO: 266488 - DNA, 25 bp, Probe sequence
taatgacactggcggtggcgacggt

SEQ ID NO: 266489 - DNA, 25 bp, Probe sequence
ttctaatgacactggcggtggcgac

SEQ ID NO: 266490 - DNA, 25 bp, Probe sequence
tatcaagatccaatggtccatggtg

SEQ ID NO: 266491 - DNA, 25 bp, Probe sequence
atcagacagcgactcagactcagac

SEQ ID NO: 266492 - DNA, 25 bp, Probe sequence
gcgattcagactcagatagcgattc

SEQ ID NO: 266493 - DNA, 25 bp, Probe sequence
agcgactcagactcagatagcgact

SEQ ID NO: 266494 - DNA, 25 bp, Probe sequence
agcgactcagattcagactcagaca

SEQ ID NO: 266495 - DNA, 25 bp, Probe sequence
agcgactcagattcagacagtgact

SEQ ID NO: 266496 - DNA, 25 bp, Probe sequence
gactcagacagtgattccgattcag

SEQ ID NO: 266497 - DNA, 25 bp, Probe sequence
aacaccaactacacctcaagaatct

SEQ ID NO: 266498 - DNA, 25 bp, Probe sequence
aactaaaccagttgctacagctcca

SEQ ID NO: 266499 - DNA, 25 bp, Probe sequence
aagcgactcagactcagacagtgac

SEQ ID NO: 266500 - DNA, 25 bp, Probe sequence
caactactactgatgcctcgggtaa

SEQ ID NO: 266501 - DNA, 25 bp, Probe sequence
cgccgaggacgacttagcagttcaa

SEQ ID NO: 266502 - DNA, 25 bp, Probe sequence
cgaaacgccagctggatatcttcca

SEQ ID NO: 266503 - DNA, 25 bp, Probe sequence
gcgactcagactcagacagtgactc

SEQ ID NO: 266504 - DNA, 25 bp, Probe sequence
gcgattcagactcggatagcgactc

SEQ ID NO: 266505 - DNA, 25 bp, Probe sequence
gcgactcagactcagatagcgactc

SEQ ID NO: 266506 - DNA, 25 bp, Probe sequence
gcgactcagattcagatagcgactc

SEQ ID NO: 266507 - DNA, 25 bp, Probe sequence
gcacaaccagcagcagttgcttcaa

SEQ ID NO: 266508 - DNA, 25 bp, Probe sequence
gaagcaccaactacatctagtactc

SEQ ID NO: 266509 - DNA, 25 bp, Probe sequence
gaaaattcacaaccgcaaccaacgc

SEQ ID NO: 266510 - DNA, 25 bp, Probe sequence
gacagtgactcagactcagatagcg

SEQ ID NO: 266511 - DNA, 25 bp, Probe sequence
gactcagacagtgactcagacagtg

SEQ ID NO: 266512 - DNA, 25 bp, Probe sequence
gactcagacagtgactcagactcag

SEQ ID NO: 266513 - DNA, 25 bp, Probe sequence
gactcagattcagacagcgattcag

SEQ ID NO: 266514 - DNA, 25 bp, Probe sequence
gcgattcagactcagatagcgactc

SEQ ID NO: 266515 - DNA, 25 bp, Probe sequence
gtgactcagactcagacagtgactc

SEQ ID NO: 266516 - DNA, 25 bp, Probe sequence
ggtggtggtgacggtatctgttaaa

SEQ ID NO: 266517 - DNA, 25 bp, Probe sequence
ggagacgattccttcagatattacg

SEQ ID NO: 266518 - DNA, 25 bp, Probe sequence
tgaaacaccagcaggttacacgcca

SEQ ID NO: 266519 - DNA, 25 bp, Probe sequence
tgcatcgggtcaacaattacctcaa

SEQ ID NO: 266520 - DNA, 25 bp, Probe sequence
tcaactactgactctggtggtggtg

SEQ ID NO: 266521 - DNA, 25 bp, Probe sequence
tcagacagtgactcagactcagaca

SEQ ID NO: 266522 - DNA, 25 bp, Probe sequence
tacggatgatttcacaccagttgat

SEQ ID NO: 266523 - DNA, 25 bp, Probe sequence
tacgctttgcagttgcacaaccagc

SEQ ID NO: 266524 - DNA, 25 bp, Probe sequence
tattcgcagcattaggttcattatt

SEQ ID NO: 266525 - DNA, 25 bp, Probe sequence
atatacaccgggtgctgaggatgac

SEQ ID NO: 266526 - DNA, 25 bp, Probe sequence
atacaccgggtgctgaggatgactt

SEQ ID NO: 266527 - DNA, 25 bp, Probe sequence
ataagcatacaattccttcagatat

SEQ ID NO: 266528 - DNA, 25 bp, Probe sequence
atgataagcatacaattccttcaga

SEQ ID NO: 266529 - DNA, 25 bp, Probe sequence
agtaaatatacaccgggtgctgagg

SEQ ID NO: 266530 - DNA, 25 bp, Probe sequence
accgggtgctgaggatgacttagca

SEQ ID NO: 266531 - DNA, 25 bp, Probe sequence
acaccgggtgctgaggatgacttag

SEQ ID NO: 266532 - DNA, 25 bp, Probe sequence
aaatatacaccgggtgctgaggatg

SEQ ID NO: 266533 - DNA, 25 bp, Probe sequence
caccgggtgctgaggatgacttagc

SEQ ID NO: 266534 - DNA, 25 bp, Probe sequence
aatatacaccgggtgctgaggatga

SEQ ID NO: 266535 - DNA, 25 bp, Probe sequence
cgggtgctgaggatgacttagcagt

SEQ ID NO: 266536 - DNA, 25 bp, Probe sequence
ccgggtgctgaggatgacttagcag

SEQ ID NO: 266537 - DNA, 25 bp, Probe sequence
gataagcatacaattccttcagata

SEQ ID NO: 266538 - DNA, 25 bp, Probe sequence
gtaaatatacaccgggtgctgagga

SEQ ID NO: 266539 - DNA, 25 bp, Probe sequence
gtgctgaggatgacttagcagttca

SEQ ID NO: 266540 - DNA, 25 bp, Probe sequence
gggtgctgaggatgacttagcagtt

SEQ ID NO: 266541 - DNA, 25 bp, Probe sequence
ggtgctgaggatgacttagcagttc

SEQ ID NO: 266542 - DNA, 25 bp, Probe sequence
tgataagcatacaattccttcagat

SEQ ID NO: 266543 - DNA, 25 bp, Probe sequence
tgctgaggatgacttagcagttcaa

SEQ ID NO: 266544 - DNA, 25 bp, Probe sequence
taagcatacaattccttcagatatt

SEQ ID NO: 266545 - DNA, 25 bp, Probe sequence
taaatatacaccgggtgctgaggat

SEQ ID NO: 266546 - DNA, 25 bp, Probe sequence
tacaccgggtgctgaggatgactta

SEQ ID NO: 266547 - DNA, 25 bp, Probe sequence
tagtaaatatacaccgggtgctgag

SEQ ID NO: 266548 - DNA, 25 bp, Probe sequence
tatgataagcatacaattccttcag

SEQ ID NO: 266549 - DNA, 25 bp, Probe sequence
tatacaccgggtgctgaggatgact

SEQ ID NO: 266550 - DNA, 25 bp, Probe sequence
atttaggtattgccaatatcttagt

SEQ ID NO: 266551 - DNA, 25 bp, Probe sequence
agagatggtaattcttcgattatat

SEQ ID NO: 266552 - DNA, 25 bp, Probe sequence
actgaccttgaggctatgaagtttg

SEQ ID NO: 266553 - DNA, 25 bp, Probe sequence
aaatctactgaccttgaggctatga

SEQ ID NO: 266554 - DNA, 25 bp, Probe sequence
aatgtatgatagagtcttactgcaa

SEQ ID NO: 266555 - DNA, 25 bp, Probe sequence
aatctactgaccttgaggctatgaa

SEQ ID NO: 266556 - DNA, 25 bp, Probe sequence
aatcaacttggtggttatccatatt

SEQ ID NO: 266557 - DNA, 25 bp, Probe sequence
aattcttcgattatatggggtgatt

SEQ ID NO: 266558 - DNA, 25 bp, Probe sequence
caagaacgaacgatcaagaactgaa

SEQ ID NO: 266559 - DNA, 25 bp, Probe sequence
caacttggtggttatccatattttg

SEQ ID NO: 266560 - DNA, 25 bp, Probe sequence
catgtattcatgggattgcagctaa

SEQ ID NO: 266561 - DNA, 25 bp, Probe sequence
catttaatcaacttggtggttatcc

SEQ ID NO: 266562 - DNA, 25 bp, Probe sequence
cttggtggttatccatattttgacc

SEQ ID NO: 266563 - DNA, 25 bp, Probe sequence
cttactgcaaattgattctacaaga

SEQ ID NO: 266564 - DNA, 25 bp, Probe sequence
gcaaattgattctacaagagatggt

SEQ ID NO: 266565 - DNA, 25 bp, Probe sequence
gaagtttgatgattacatgtattca

SEQ ID NO: 266566 - DNA, 25 bp, Probe sequence
gaacgatcaagaactgaaaatgtat

SEQ ID NO: 266567 - DNA, 25 bp, Probe sequence
gaccaaatagatccaagaacgaacg

SEQ ID NO: 266568 - DNA, 25 bp, Probe sequence
gaccttgaggctatgaagtttgatg

SEQ ID NO: 266569 - DNA, 25 bp, Probe sequence
gagtcttactgcaaattgattctac

SEQ ID NO: 266570 - DNA, 25 bp, Probe sequence
gaggctatgaagtttgatgattaca

SEQ ID NO: 266571 - DNA, 25 bp, Probe sequence
gatggtaattcttcgattatatggg

SEQ ID NO: 266572 - DNA, 25 bp, Probe sequence
gatagagtcttactgcaaattgatt

SEQ ID NO: 266573 - DNA, 25 bp, Probe sequence
gtatgatagagtcttactgcaaatt

SEQ ID NO: 266574 - DNA, 25 bp, Probe sequence
gtcttactgcaaattgattctacaa

SEQ ID NO: 266575 - DNA, 25 bp, Probe sequence
ggggtgatttaggtattgccaatat

SEQ ID NO: 266576 - DNA, 25 bp, Probe sequence
ggtggttatccatattttgaccaaa

SEQ ID NO: 266577 - DNA, 25 bp, Probe sequence
ggtgatttaggtattgccaatatct

SEQ ID NO: 266578 - DNA, 25 bp, Probe sequence
ggttatccatattttgaccaaatag

SEQ ID NO: 266579 - DNA, 25 bp, Probe sequence
ggaacctgtgtgtaacacatttact

SEQ ID NO: 266580 - DNA, 25 bp, Probe sequence
tgtgtaacacatttactgctaagga

SEQ ID NO: 266581 - DNA, 25 bp, Probe sequence
tgtgtgtaacacatttactgctaag

SEQ ID NO: 266582 - DNA, 25 bp, Probe sequence
tctactgaccttgaggctatgaagt

SEQ ID NO: 266583 - DNA, 25 bp, Probe sequence
tcttcgattatatggggtgatttag

SEQ ID NO: 266584 - DNA, 25 bp, Probe sequence
atccatccttcgcgctaaaatttaa

SEQ ID NO: 266585 - DNA, 25 bp, Probe sequence
atccttcgcgctaaaatttaaccat

SEQ ID NO: 266586 - DNA, 25 bp, Probe sequence
atgcaagaagaaactttaagccaga

SEQ ID NO: 266587 - DNA, 25 bp, Probe sequence
atggatttaaaagagatgcaagaag

SEQ ID NO: 266588 - DNA, 25 bp, Probe sequence
agattaatttgaatgatcttccaga

SEQ ID NO: 266589 - DNA, 25 bp, Probe sequence
agatgcaagaagaaactttaagcca

SEQ ID NO: 266590 - DNA, 25 bp, Probe sequence
agaaactttaagccagagtaagatt

SEQ ID NO: 266591 - DNA, 25 bp, Probe sequence
agaagaaactttaagccagagtaag

SEQ ID NO: 266592 - DNA, 25 bp, Probe sequence
aaactttaagccagagtaagattgg

SEQ ID NO: 266593 - DNA, 25 bp, Probe sequence
aagaaactttaagccagagtaagat

SEQ ID NO: 266594 - DNA, 25 bp, Probe sequence
aatttgaatgatcttccagaacaac

SEQ ID NO: 266595 - DNA, 25 bp, Probe sequence
caagaagaaactttaagccagagta

SEQ ID NO: 266596 - DNA, 25 bp, Probe sequence
cacagattaatttgaatgatcttcc

SEQ ID NO: 266597 - DNA, 25 bp, Probe sequence
catccttcgcgctaaaatttaacca

SEQ ID NO: 266598 - DNA, 25 bp, Probe sequence
cttcgcgctaaaatttaaccatagt

SEQ ID NO: 266599 - DNA, 25 bp, Probe sequence
ccttcgcgctaaaatttaaccatag

SEQ ID NO: 266600 - DNA, 25 bp, Probe sequence
gcacagattaatttgaatgatcttc

SEQ ID NO: 266601 - DNA, 25 bp, Probe sequence
gcaagaagaaactttaagccagagt

SEQ ID NO: 266602 - DNA, 25 bp, Probe sequence
gaagaaactttaagccagagtaaga

SEQ ID NO: 266603 - DNA, 25 bp, Probe sequence
gaaactttaagccagagtaagattg

SEQ ID NO: 266604 - DNA, 25 bp, Probe sequence
gagatgcaagaagaaactttaagcc

SEQ ID NO: 266605 - DNA, 25 bp, Probe sequence
gatgcaagaagaaactttaagccag

SEQ ID NO: 266606 - DNA, 25 bp, Probe sequence
gattaatttgaatgatcttccagaa

SEQ ID NO: 266607 - DNA, 25 bp, Probe sequence
ggatttaaaagagatgcaagaagaa

SEQ ID NO: 266608 - DNA, 25 bp, Probe sequence
tggatttaaaagagatgcaagaaga

SEQ ID NO: 266609 - DNA, 25 bp, Probe sequence
tgcaagaagaaactttaagccagag

SEQ ID NO: 266610 - DNA, 25 bp, Probe sequence
tccatccttcgcgctaaaatttaac

SEQ ID NO: 266611 - DNA, 25 bp, Probe sequence
tccttcgcgctaaaatttaaccata

SEQ ID NO: 266612 - DNA, 25 bp, Probe sequence
taatttgaatgatcttccagaacaa

SEQ ID NO: 266613 - DNA, 25 bp, Probe sequence
ttcgcgctaaaatttaaccatagta

SEQ ID NO: 266614 - DNA, 25 bp, Probe sequence
attgtcggaatctgatgatgaagta

SEQ ID NO: 266615 - DNA, 25 bp, Probe sequence
atcatattgttgacgataatcctga

SEQ ID NO: 266616 - DNA, 25 bp, Probe sequence
atcgcatttagaacagagaaaccgt

SEQ ID NO: 266617 - DNA, 25 bp, Probe sequence
atggtgatagcgaacaaaatgacaa

SEQ ID NO: 266618 - DNA, 25 bp, Probe sequence
agatcattatttaacagacgatgta

SEQ ID NO: 266619 - DNA, 25 bp, Probe sequence
acgacaacgatgaaaaatgccaata

SEQ ID NO: 266620 - DNA, 25 bp, Probe sequence
acatcaaaagattcatcattaccta

SEQ ID NO: 266621 - DNA, 25 bp, Probe sequence
aaacatgtaattcctaaaagtcagt

SEQ ID NO: 266622 - DNA, 25 bp, Probe sequence
aaaacaaagttggtcatgaagagca

SEQ ID NO: 266623 - DNA, 25 bp, Probe sequence
taaaagtcagtaccgacgtaagcgt

SEQ ID NO: 266624 - DNA, 25 bp, Probe sequence
aacggtgggatatcaaagtcagtca

SEQ ID NO: 266625 - DNA, 25 bp, Probe sequence
aagcgtcgtgaattcttccacaacg

SEQ ID NO: 266626 - DNA, 25 bp, Probe sequence
aagcatctcaagacgaagtgggatc

SEQ ID NO: 266627 - DNA, 25 bp, Probe sequence
aagacatcggcaaataataatcaaa

SEQ ID NO: 266628 - DNA, 25 bp, Probe sequence
aatcggtcgttacagttgaaaatga

SEQ ID NO: 266629 - DNA, 25 bp, Probe sequence
aatagtttatcatcgcatttagaac

SEQ ID NO: 266630 - DNA, 25 bp, Probe sequence
caaaattgaacaaagggcgcgctac

SEQ ID NO: 266631 - DNA, 25 bp, Probe sequence
cagttaaatcggtcgttacagttga

SEQ ID NO: 266632 - DNA, 25 bp, Probe sequence
gacagctcgatgcagacagagaaaa

SEQ ID NO: 266633 - DNA, 25 bp, Probe sequence
gacgtaagcgtcgtgaattcttcca

SEQ ID NO: 266634 - DNA, 25 bp, Probe sequence
gagcaacatgtactttctaaacctt

SEQ ID NO: 266635 - DNA, 25 bp, Probe sequence
gagtcttcaagaactgattcagaca

SEQ ID NO: 266636 - DNA, 25 bp, Probe sequence
gatgacgatcgaaaacttgatgaaa

SEQ ID NO: 266637 - DNA, 25 bp, Probe sequence
gatgctcaaaaatatacgacaacga

SEQ ID NO: 266638 - DNA, 25 bp, Probe sequence
gataataatgatgcagatgctcaaa

SEQ ID NO: 266639 - DNA, 25 bp, Probe sequence
gattcaattgataagcacgaacgtt

SEQ ID NO: 266640 - DNA, 25 bp, Probe sequence
gttttggatgatgtattggcctaaa

SEQ ID NO: 266641 - DNA, 25 bp, Probe sequence
gtattggcctaaattagttattcta

SEQ ID NO: 266642 - DNA, 25 bp, Probe sequence
gtagtaatctgaaatctgaagtaat

SEQ ID NO: 266643 - DNA, 25 bp, Probe sequence
gtactttctaaaccttcagaacatg

SEQ ID NO: 266644 - DNA, 25 bp, Probe sequence
tgattcagacagctcgatgcagaca

SEQ ID NO: 266645 - DNA, 25 bp, Probe sequence
gtgaattcttccacaacgaagacag

SEQ ID NO: 266646 - DNA, 25 bp, Probe sequence
ggagtggacattagtggatattggt

SEQ ID NO: 266647 - DNA, 25 bp, Probe sequence
tcaagacgaagtgggatcaggtgtt

SEQ ID NO: 266648 - DNA, 25 bp, Probe sequence
attgccagtctaaatagttttgaaa

SEQ ID NO: 266649 - DNA, 25 bp, Probe sequence
ataatttagtgttaggagagccaat

SEQ ID NO: 266650 - DNA, 25 bp, Probe sequence
atccaggtaactcgggtggtgctgt

SEQ ID NO: 266651 - DNA, 25 bp, Probe sequence
agtcgtaggtaatccacttggtgta

SEQ ID NO: 266652 - DNA, 25 bp, Probe sequence
agtgttgttgggaaagtgcttggta

SEQ ID NO: 266653 - DNA, 25 bp, Probe sequence
agaaggtattatttcaggtctgaac

SEQ ID NO: 266654 - DNA, 25 bp, Probe sequence
acgctttaggcagattatatttagt

SEQ ID NO: 266655 - DNA, 25 bp, Probe sequence
acttcttcagacagttcagtgaaag

SEQ ID NO: 266656 - DNA, 25 bp, Probe sequence
aaatatgtcatttgcaatacctgtt

SEQ ID NO: 266657 - DNA, 25 bp, Probe sequence
aaatggtcagatttagctgttgtta

SEQ ID NO: 266658 - DNA, 25 bp, Probe sequence
aaagagatagctattggagattcaa

SEQ ID NO: 266659 - DNA, 25 bp, Probe sequence
aaggtaaaattgactatcccgatgt

SEQ ID NO: 266660 - DNA, 25 bp, Probe sequence
aatgaagaatattgccagtctaaat

SEQ ID NO: 266661 - DNA, 25 bp, Probe sequence
aattgactatcccgatgtaggtgtt

SEQ ID NO: 266662 - DNA, 25 bp, Probe sequence
gctaaaattagtatgccaaacgttg

SEQ ID NO: 266663 - DNA, 25 bp, Probe sequence
gaatgcacacgttgtcggtgataaa

SEQ ID NO: 266664 - DNA, 25 bp, Probe sequence
gaagatgatttacgctttaggcaga

SEQ ID NO: 266665 - DNA, 25 bp, Probe sequence
gaacggtgttgttgtagatcaagtt

SEQ ID NO: 266666 - DNA, 25 bp, Probe sequence
gaaagctttccaaattgatgcatca

SEQ ID NO: 266667 - DNA, 25 bp, Probe sequence
gatgacttgaaatcaattacagcga

SEQ ID NO: 266668 - DNA, 25 bp, Probe sequence
gatgcatcagtaaatccaggtaact

SEQ ID NO: 266669 - DNA, 25 bp, Probe sequence
gttgacaacaatggtttagcagatc

SEQ ID NO: 266670 - DNA, 25 bp, Probe sequence
gttacgaatgcacacgttgtcggtg

SEQ ID NO: 266671 - DNA, 25 bp, Probe sequence
gttatatattgttacgaatgcacac

SEQ ID NO: 266672 - DNA, 25 bp, Probe sequence
gtttagcagatcaatctggtctgaa

SEQ ID NO: 266673 - DNA, 25 bp, Probe sequence
gtatgccaaacgttgaaaatatgtc

SEQ ID NO: 266674 - DNA, 25 bp, Probe sequence
ggtgtagttgcagctaaaattagta

SEQ ID NO: 266675 - DNA, 25 bp, Probe sequence
ggtaatccacttggtgtagacttta

SEQ ID NO: 266676 - DNA, 25 bp, Probe sequence
ggagagccaatattagtcgtaggta

SEQ ID NO: 266677 - DNA, 25 bp, Probe sequence
tacagcgaagatttatagagatggt

SEQ ID NO: 266678 - DNA, 25 bp, Probe sequence
tactgaattagatggcaaactttta

SEQ ID NO: 266679 - DNA, 25 bp, Probe sequence
tagactttaaaggcactgtgacaga

SEQ ID NO: 266680 - DNA, 25 bp, Probe sequence
tatcccgatgtaggtgttaaaatga

SEQ ID NO: 266681 - DNA, 25 bp, Probe sequence
ttgcaatacctgttaatgaagtaca

SEQ ID NO: 266682 - DNA, 25 bp, Probe sequence
attcgaatatggtgcacgtccacaa

SEQ ID NO: 266683 - DNA, 25 bp, Probe sequence
attaatcacaatatcgtagagtaca

SEQ ID NO: 266684 - DNA, 25 bp, Probe sequence
atgacggtacattcgaatatggtgc

SEQ ID NO: 266685 - DNA, 25 bp, Probe sequence
atggtgcacgtccacaatttaataa

SEQ ID NO: 266686 - DNA, 25 bp, Probe sequence
agatgcaagcgaaggatacggtcca

SEQ ID NO: 266687 - DNA, 25 bp, Probe sequence
agcgatagcggcaattggtattact

SEQ ID NO: 266688 - DNA, 25 bp, Probe sequence
aaatcattactagcgatagcggcaa

SEQ ID NO: 266689 - DNA, 25 bp, Probe sequence
aaacacatactgtgagcgcacatag

SEQ ID NO: 266690 - DNA, 25 bp, Probe sequence
aaccagcagcgaaaactgaggcaac

SEQ ID NO: 266691 - DNA, 25 bp, Probe sequence
aagcccaaaatcttgtgagagaatt

SEQ ID NO: 266692 - DNA, 25 bp, Probe sequence
aaggcagtcaacttagtatcatttg

SEQ ID NO: 266693 - DNA, 25 bp, Probe sequence
aatatcgtagagtacaatgatggta

SEQ ID NO: 266694 - DNA, 25 bp, Probe sequence
ctacaactacaattgcgtcaactgc

SEQ ID NO: 266695 - DNA, 25 bp, Probe sequence
ccacaatttaataaaccagcagcga

SEQ ID NO: 266696 - DNA, 25 bp, Probe sequence
gcgaaaactgaggcaactattaaaa

SEQ ID NO: 266697 - DNA, 25 bp, Probe sequence
gcggcaattggtattactacaacta

SEQ ID NO: 266698 - DNA, 25 bp, Probe sequence
gcaagcgaaggatacggtccaagag

SEQ ID NO: 266699 - DNA, 25 bp, Probe sequence
gcaagagcgaattgatcaagtatta

SEQ ID NO: 266700 - DNA, 25 bp, Probe sequence
gaatatggtgcacgtccacaattta

SEQ ID NO: 266701 - DNA, 25 bp, Probe sequence
gaacaaaaattgattcaagcccaaa

SEQ ID NO: 266702 - DNA, 25 bp, Probe sequence
gaaaagcacaaaaggcagtcaactt

SEQ ID NO: 266703 - DNA, 25 bp, Probe sequence
gaaaagaaaccagtgagtattaatc

SEQ ID NO: 266704 - DNA, 25 bp, Probe sequence
gacatgattataacatcgtggaata

SEQ ID NO: 266705 - DNA, 25 bp, Probe sequence
gatagcaaaatcattactagcgata

SEQ ID NO: 266706 - DNA, 25 bp, Probe sequence
gatattgcaagagcgaattgatcaa

SEQ ID NO: 266707 - DNA, 25 bp, Probe sequence
gattcaagcccaaaatcttgtgaga

SEQ ID NO: 266708 - DNA, 25 bp, Probe sequence
gtattactacaactacaattgcgtc

SEQ ID NO: 266709 - DNA, 25 bp, Probe sequence
gtcaacttagtatcatttgaataca

SEQ ID NO: 266710 - DNA, 25 bp, Probe sequence
gtgagcgcacatagaaaagcacaaa

SEQ ID NO: 266711 - DNA, 25 bp, Probe sequence
ggtacttttaaatatcaatctagac

SEQ ID NO: 266712 - DNA, 25 bp, Probe sequence
ggtacattcgaatatggtgcacgtc

SEQ ID NO: 266713 - DNA, 25 bp, Probe sequence
tacaattgcgtcaactgcagatgca

SEQ ID NO: 266714 - DNA, 25 bp, Probe sequence
tagaccaaaatttaatacaacacct

SEQ ID NO: 266715 - DNA, 25 bp, Probe sequence
ttgcgtcaactgcagatgcaagcga

SEQ ID NO: 266716 - DNA, 25 bp, Probe sequence
attatgattattttaacagttattt

SEQ ID NO: 266717 - DNA, 25 bp, Probe sequence
atttctttaggtgtaatctcagtat

SEQ ID NO: 266718 - DNA, 25 bp, Probe sequence
atgattattttaacagttatttctt

SEQ ID NO: 266719 - DNA, 25 bp, Probe sequence
aggtgtaatctcagtatatgctcct

SEQ ID NO: 266720 - DNA, 25 bp, Probe sequence
agttatttctttaggtgtaatctca

SEQ ID NO: 266721 - DNA, 25 bp, Probe sequence
acagttatttctttaggtgtaatct

SEQ ID NO: 266722 - DNA, 25 bp, Probe sequence
aaagagccatttgcccaattcattc

SEQ ID NO: 266723 - DNA, 25 bp, Probe sequence
aacgaaaaaaatattatgcgattat

SEQ ID NO: 266724 - DNA, 25 bp, Probe sequence
aagagccatttgcccaattcattca

SEQ ID NO: 266725 - DNA, 25 bp, Probe sequence
aattatgattattttaacagttatt

SEQ ID NO: 266726 - DNA, 25 bp, Probe sequence
caaagagccatttgcccaattcatt

SEQ ID NO: 266727 - DNA, 25 bp, Probe sequence
cagttatttctttaggtgtaatctc

SEQ ID NO: 266728 - DNA, 25 bp, Probe sequence
ctttaggtgtaatctcagtatatgc

SEQ ID NO: 266729 - DNA, 25 bp, Probe sequence
gttatttctttaggtgtaatctcag

SEQ ID NO: 266730 - DNA, 25 bp, Probe sequence
gtaatctcagtatatgctcctgcag

SEQ ID NO: 266731 - DNA, 25 bp, Probe sequence
gtgtaatctcagtatatgctcctgc

SEQ ID NO: 266732 - DNA, 25 bp, Probe sequence
ggtgtaatctcagtatatgctcctg

SEQ ID NO: 266733 - DNA, 25 bp, Probe sequence
tgtaatctcagtatatgctcctgca

SEQ ID NO: 266734 - DNA, 25 bp, Probe sequence
tgattattttaacagttatttcttt

SEQ ID NO: 266735 - DNA, 25 bp, Probe sequence
tctttaggtgtaatctcagtatatg

SEQ ID NO: 266736 - DNA, 25 bp, Probe sequence
tcaaagagccatttgcccaattcat

SEQ ID NO: 266737 - DNA, 25 bp, Probe sequence
taattatgattattttaacagttat

SEQ ID NO: 266738 - DNA, 25 bp, Probe sequence
taatctcagtatatgctcctgcagc

SEQ ID NO: 266739 - DNA, 25 bp, Probe sequence
taacagttatttctttaggtgtaat

SEQ ID NO: 266740 - DNA, 25 bp, Probe sequence
taggtgtaatctcagtatatgctcc

SEQ ID NO: 266741 - DNA, 25 bp, Probe sequence
tatgattattttaacagttatttct

SEQ ID NO: 266742 - DNA, 25 bp, Probe sequence
tatttctttaggtgtaatctcagta

SEQ ID NO: 266743 - DNA, 25 bp, Probe sequence
tttctttaggtgtaatctcagtata

SEQ ID NO: 266744 - DNA, 25 bp, Probe sequence
tttaggtgtaatctcagtatatgct

SEQ ID NO: 266745 - DNA, 25 bp, Probe sequence
ttatttctttaggtgtaatctcagt

SEQ ID NO: 266746 - DNA, 25 bp, Probe sequence
ttaggtgtaatctcagtatatgctc

SEQ ID NO: 266747 - DNA, 25 bp, Probe sequence
ttatgattattttaacagttatttc

SEQ ID NO: 266748 - DNA, 25 bp, Probe sequence
ttctttaggtgtaatctcagtatat

SEQ ID NO: 266749 - DNA, 25 bp, Probe sequence
attcacactcttgcctttaatatta

SEQ ID NO: 266750 - DNA, 25 bp, Probe sequence
attatgacagttatcgccataggta

SEQ ID NO: 266751 - DNA, 25 bp, Probe sequence
atttttttattcacactcttgcctt

SEQ ID NO: 266752 - DNA, 25 bp, Probe sequence
atttgctcaattcatgcaattaggc

SEQ ID NO: 266753 - DNA, 25 bp, Probe sequence
atgactattatgacagttatcgcca

SEQ ID NO: 266754 - DNA, 25 bp, Probe sequence
atgacagttatcgccataggtatga

SEQ ID NO: 266755 - DNA, 25 bp, Probe sequence
accatttgctcaattcatgcaatta

SEQ ID NO: 266756 - DNA, 25 bp, Probe sequence
acactcttgcctttaatattagtaa

SEQ ID NO: 266757 - DNA, 25 bp, Probe sequence
aaagaaccatttgctcaattcatgc

SEQ ID NO: 266758 - DNA, 25 bp, Probe sequence
aagcggaaacgaaattatgcgatta

SEQ ID NO: 266759 - DNA, 25 bp, Probe sequence
aagaaccatttgctcaattcatgca

SEQ ID NO: 266760 - DNA, 25 bp, Probe sequence
aagtatttttttattcacactcttg

SEQ ID NO: 266761 - DNA, 25 bp, Probe sequence
cacactcttgcctttaatattagta

SEQ ID NO: 266762 - DNA, 25 bp, Probe sequence
cagttatcgccataggtatgataat

SEQ ID NO: 266763 - DNA, 25 bp, Probe sequence
ctattatgacagttatcgccatagg

SEQ ID NO: 266764 - DNA, 25 bp, Probe sequence
cggaaacgaaattatgcgattattg

SEQ ID NO: 266765 - DNA, 25 bp, Probe sequence
gaaccatttgctcaattcatgcaat

SEQ ID NO: 266766 - DNA, 25 bp, Probe sequence
gaaagtatttttttattcacactct

SEQ ID NO: 266767 - DNA, 25 bp, Probe sequence
gacagttatcgccataggtatgata

SEQ ID NO: 266768 - DNA, 25 bp, Probe sequence
gactattatgacagttatcgccata

SEQ ID NO: 266769 - DNA, 25 bp, Probe sequence
gtatttttttattcacactcttgcc

SEQ ID NO: 266770 - DNA, 25 bp, Probe sequence
ggtatgataattagatatgctcctg

SEQ ID NO: 266771 - DNA, 25 bp, Probe sequence
tggtgttatgtggaaagtatttttt

SEQ ID NO: 266772 - DNA, 25 bp, Probe sequence
tgtgcgacttattaagcggaaacga

SEQ ID NO: 266773 - DNA, 25 bp, Probe sequence
tcattttggtgttatgtggaaagta

SEQ ID NO: 266774 - DNA, 25 bp, Probe sequence
tcacactcttgcctttaatattagt

SEQ ID NO: 266775 - DNA, 25 bp, Probe sequence
tagtaaactatcatattaacttttt

SEQ ID NO: 266776 - DNA, 25 bp, Probe sequence
tatttttttattcacactcttgcct

SEQ ID NO: 266777 - DNA, 25 bp, Probe sequence
tattcacactcttgcctttaatatt

SEQ ID NO: 266778 - DNA, 25 bp, Probe sequence
tttattcacactcttgcctttaata

SEQ ID NO: 266779 - DNA, 25 bp, Probe sequence
ttttattcacactcttgcctttaat

SEQ ID NO: 266780 - DNA, 25 bp, Probe sequence
ttattcacactcttgcctttaatat

SEQ ID NO: 266781 - DNA, 25 bp, Probe sequence
ttcacactcttgcctttaatattag

SEQ ID NO: 266782 - DNA, 25 bp, Probe sequence
ttgctcaattcatgcaattaggcat

SEQ ID NO: 266783 - DNA, 25 bp, Probe sequence
attttgacgtttattgctattggtt

SEQ ID NO: 266784 - DNA, 25 bp, Probe sequence
atagaagccattactttactaccta

SEQ ID NO: 266785 - DNA, 25 bp, Probe sequence
atgactattttgacgtttattgcta

SEQ ID NO: 266786 - DNA, 25 bp, Probe sequence
agacatgctcatggtgcccatgcac

SEQ ID NO: 266787 - DNA, 25 bp, Probe sequence
agaagccattactttactacctatt

SEQ ID NO: 266788 - DNA, 25 bp, Probe sequence
agaagacatgctcatggtgcccatg

SEQ ID NO: 266789 - DNA, 25 bp, Probe sequence
agaaccatttgcccaatttattcaa

SEQ ID NO: 266790 - DNA, 25 bp, Probe sequence
actattttgacgtttattgctattg

SEQ ID NO: 266791 - DNA, 25 bp, Probe sequence
acatgctcatggtgcccatgcacct

SEQ ID NO: 266792 - DNA, 25 bp, Probe sequence
aactgattgttatgtatacgattgc

SEQ ID NO: 266793 - DNA, 25 bp, Probe sequence
aagacatgctcatggtgcccatgca

SEQ ID NO: 266794 - DNA, 25 bp, Probe sequence
aagaaccatttgcccaatttattca

SEQ ID NO: 266795 - DNA, 25 bp, Probe sequence
aatagaagccattactttactacct

SEQ ID NO: 266796 - DNA, 25 bp, Probe sequence
aatattacgcaattattgttagttt

SEQ ID NO: 266797 - DNA, 25 bp, Probe sequence
caaagaaccatttgcccaatttatt

SEQ ID NO: 266798 - DNA, 25 bp, Probe sequence
ctattcccgttcgacttattaagcg

SEQ ID NO: 266799 - DNA, 25 bp, Probe sequence
ctattttgacgtttattgctattgg

SEQ ID NO: 266800 - DNA, 25 bp, Probe sequence
ctgattgttatgtatacgattgcct

SEQ ID NO: 266801 - DNA, 25 bp, Probe sequence
gccattactttactacctattttct

SEQ ID NO: 266802 - DNA, 25 bp, Probe sequence
gaagacatgctcatggtgcccatgc

SEQ ID NO: 266803 - DNA, 25 bp, Probe sequence
gaagccattactttactacctattt

SEQ ID NO: 266804 - DNA, 25 bp, Probe sequence
gaaccatttgcccaatttattcaat

SEQ ID NO: 266805 - DNA, 25 bp, Probe sequence
gactattttgacgtttattgctatt

SEQ ID NO: 266806 - DNA, 25 bp, Probe sequence
gacgtttattgctattggtttgata

SEQ ID NO: 266807 - DNA, 25 bp, Probe sequence
gtttattgctattggtttgataatt

SEQ ID NO: 266808 - DNA, 25 bp, Probe sequence
ggtttgataattaaatatgctcctg

SEQ ID NO: 266809 - DNA, 25 bp, Probe sequence
ggaaaactgattgttatgtatacga

SEQ ID NO: 266810 - DNA, 25 bp, Probe sequence
tgactattttgacgtttattgctat

SEQ ID NO: 266811 - DNA, 25 bp, Probe sequence
tgacgtttattgctattggtttgat

SEQ ID NO: 266812 - DNA, 25 bp, Probe sequence
tagaagccattactttactacctat

SEQ ID NO: 266813 - DNA, 25 bp, Probe sequence
tattcccgttcgacttattaagcga

SEQ ID NO: 266814 - DNA, 25 bp, Probe sequence
tttgacgtttattgctattggtttg

SEQ ID NO: 266815 - DNA, 25 bp, Probe sequence
ttatgactattttgacgtttattgc

SEQ ID NO: 266816 - DNA, 25 bp, Probe sequence
ttaattatgactattttgacgttta

SEQ ID NO: 266817 - DNA, 25 bp, Probe sequence
atacgctataatgcacatggtgctc

SEQ ID NO: 266818 - DNA, 25 bp, Probe sequence
atgcacatggtgctcatgcaaagtc

SEQ ID NO: 266819 - DNA, 25 bp, Probe sequence
agtcttcgatactttgttacataca

SEQ ID NO: 266820 - DNA, 25 bp, Probe sequence
actggccttatctattataggattg

SEQ ID NO: 266821 - DNA, 25 bp, Probe sequence
acttatttactggccttatctatta

SEQ ID NO: 266822 - DNA, 25 bp, Probe sequence
aatacatccattttatgctcaattt

SEQ ID NO: 266823 - DNA, 25 bp, Probe sequence
cacttatcctatatgttaatacgct

SEQ ID NO: 266824 - DNA, 25 bp, Probe sequence
catggtgctcatgcaaagtcttcga

SEQ ID NO: 266825 - DNA, 25 bp, Probe sequence
catccattttatgctcaatttatgt

SEQ ID NO: 266826 - DNA, 25 bp, Probe sequence
ccgttgttatttatgcacctgcagc

SEQ ID NO: 266827 - DNA, 25 bp, Probe sequence
gcagcaacgaaaaagcaacctatac

SEQ ID NO: 266828 - DNA, 25 bp, Probe sequence
gatttccgttgttatttatgcacct

SEQ ID NO: 266829 - DNA, 25 bp, Probe sequence
gattctatccttaataatacatcca

SEQ ID NO: 266830 - DNA, 25 bp, Probe sequence
gattgatttccgttgttatttatgc

SEQ ID NO: 266831 - DNA, 25 bp, Probe sequence
gttaatacgctataatgcacatggt

SEQ ID NO: 266832 - DNA, 25 bp, Probe sequence
gttacacacttatcctatatgttaa

SEQ ID NO: 266833 - DNA, 25 bp, Probe sequence
gttatttatgcacctgcagcaacga

SEQ ID NO: 266834 - DNA, 25 bp, Probe sequence
gtatttgtaccttcattttctaatt

SEQ ID NO: 266835 - DNA, 25 bp, Probe sequence
gtaccttcattttctaattaatata

SEQ ID NO: 266836 - DNA, 25 bp, Probe sequence
ggtgctcatgcaaagtcttcgatac

SEQ ID NO: 266837 - DNA, 25 bp, Probe sequence
tgctcatgcaaagtcttcgatactt

SEQ ID NO: 266838 - DNA, 25 bp, Probe sequence
taaccatttgtatttgtaccttcat

SEQ ID NO: 266839 - DNA, 25 bp, Probe sequence
tacttgtaacatatagtatttctat

SEQ ID NO: 266840 - DNA, 25 bp, Probe sequence
taccttagttacacacttatcctat

SEQ ID NO: 266841 - DNA, 25 bp, Probe sequence
tagacattaattttacttatttact

SEQ ID NO: 266842 - DNA, 25 bp, Probe sequence
tatgcacctgcagcaacgaaaaagc

SEQ ID NO: 266843 - DNA, 25 bp, Probe sequence
tataggattgatttccgttgttatt

SEQ ID NO: 266844 - DNA, 25 bp, Probe sequence
tatttactggccttatctattatag

SEQ ID NO: 266845 - DNA, 25 bp, Probe sequence
tttgtaccttcattttctaattaat

SEQ ID NO: 266846 - DNA, 25 bp, Probe sequence
ttttacttatttactggccttatct

SEQ ID NO: 266847 - DNA, 25 bp, Probe sequence
ttatgctcaatttatgttattagga

SEQ ID NO: 266848 - DNA, 25 bp, Probe sequence
ttacttatttactggccttatctat

SEQ ID NO: 266849 - DNA, 25 bp, Probe sequence
ttccgttgttatttatgcacctgca

SEQ ID NO: 266850 - DNA, 25 bp, Probe sequence
ttgtatttgtaccttcattttctaa

SEQ ID NO: 266851 - DNA, 25 bp, Probe sequence
attacattactaccaatatactatt

SEQ ID NO: 266852 - DNA, 25 bp, Probe sequence
attagaaggtatgcacatggtgcac

SEQ ID NO: 266853 - DNA, 25 bp, Probe sequence
attactaatatatcgttttatctaa

SEQ ID NO: 266854 - DNA, 25 bp, Probe sequence
atacaagctattacattactaccaa

SEQ ID NO: 266855 - DNA, 25 bp, Probe sequence
atcttcactttaattactaatatat

SEQ ID NO: 266856 - DNA, 25 bp, Probe sequence
accatatacccaatttattcaactg

SEQ ID NO: 266857 - DNA, 25 bp, Probe sequence
aaccatatacccaatttattcaact

SEQ ID NO: 266858 - DNA, 25 bp, Probe sequence
aagatatttttcaattataattagt

SEQ ID NO: 266859 - DNA, 25 bp, Probe sequence
aatatactattcaaaggaggactaa

SEQ ID NO: 266860 - DNA, 25 bp, Probe sequence
aatatatcgttttatctaattagaa

SEQ ID NO: 266861 - DNA, 25 bp, Probe sequence
aattagtacaattcttttcattatc

SEQ ID NO: 266862 - DNA, 25 bp, Probe sequence
caagctattacattactaccaatat

SEQ ID NO: 266863 - DNA, 25 bp, Probe sequence
cattactaccaatatactattcaaa

SEQ ID NO: 266864 - DNA, 25 bp, Probe sequence
catttttatcttcactttaattact

SEQ ID NO: 266865 - DNA, 25 bp, Probe sequence
ctaattagaaggtatgcacatggtg

SEQ ID NO: 266866 - DNA, 25 bp, Probe sequence
ccatatacccaatttattcaactgg

SEQ ID NO: 266867 - DNA, 25 bp, Probe sequence
ccaatttattcaactgggtattatt

SEQ ID NO: 266868 - DNA, 25 bp, Probe sequence
gctattacattactaccaatatact

SEQ ID NO: 266869 - DNA, 25 bp, Probe sequence
gaaccatatacccaatttattcaac

SEQ ID NO: 266870 - DNA, 25 bp, Probe sequence
gaaacactaatgatgtttttagcat

SEQ ID NO: 266871 - DNA, 25 bp, Probe sequence
gtagtgattaaatatgcacctgcag

SEQ ID NO: 266872 - DNA, 25 bp, Probe sequence
tcaactgggtattattatacaagct

SEQ ID NO: 266873 - DNA, 25 bp, Probe sequence
taaacatttttatcttcactttaat

SEQ ID NO: 266874 - DNA, 25 bp, Probe sequence
tacaagctattacattactaccaat

SEQ ID NO: 266875 - DNA, 25 bp, Probe sequence
tacattactaccaatatactattca

SEQ ID NO: 266876 - DNA, 25 bp, Probe sequence
tactaccaatatactattcaaagga

SEQ ID NO: 266877 - DNA, 25 bp, Probe sequence
tagtgattaaatatgcacctgcagc

SEQ ID NO: 266878 - DNA, 25 bp, Probe sequence
tagtacaattcttttcattatcaca

SEQ ID NO: 266879 - DNA, 25 bp, Probe sequence
tatctaattagaaggtatgcacatg

SEQ ID NO: 266880 - DNA, 25 bp, Probe sequence
tatacaagctattacattactacca

SEQ ID NO: 266881 - DNA, 25 bp, Probe sequence
ttttatcttcactttaattactaat

SEQ ID NO: 266882 - DNA, 25 bp, Probe sequence
tttattcaactgggtattattatac

SEQ ID NO: 266883 - DNA, 25 bp, Probe sequence
ttatcttcactttaattactaatat

SEQ ID NO: 266884 - DNA, 25 bp, Probe sequence
ttagtacaattcttttcattatcac

SEQ ID NO: 266885 - DNA, 25 bp, Probe sequence
ataacttagatcatattcaattttt

SEQ ID NO: 266886 - DNA, 25 bp, Probe sequence
atcatattcaatttttgcaagtacg

SEQ ID NO: 266887 - DNA, 25 bp, Probe sequence
agtgaggagagtggtgtaaaattga

SEQ ID NO: 266888 - DNA, 25 bp, Probe sequence
agtttgccacgtatcttcaaaagag

SEQ ID NO: 266889 - DNA, 25 bp, Probe sequence
agatcatattcaatttttgcaagta

SEQ ID NO: 266890 - DNA, 25 bp, Probe sequence
agaaataacttagatcatattcaat

SEQ ID NO: 266891 - DNA, 25 bp, Probe sequence
accagtttgccacgtatcttcaaaa

SEQ ID NO: 266892 - DNA, 25 bp, Probe sequence
acttagatcatattcaatttttgca

SEQ ID NO: 266893 - DNA, 25 bp, Probe sequence
aaattgaccagtttgccacgtatct

SEQ ID NO: 266894 - DNA, 25 bp, Probe sequence
aaataacttagatcatattcaattt

SEQ ID NO: 266895 - DNA, 25 bp, Probe sequence
aaaattgaccagtttgccacgtatc

SEQ ID NO: 266896 - DNA, 25 bp, Probe sequence
aaaagattgtactaaatcgtataat

SEQ ID NO: 266897 - DNA, 25 bp, Probe sequence
aacttagatcatattcaatttttgc

SEQ ID NO: 266898 - DNA, 25 bp, Probe sequence
aataacttagatcatattcaatttt

SEQ ID NO: 266899 - DNA, 25 bp, Probe sequence
aattgaccagtttgccacgtatctt

SEQ ID NO: 266900 - DNA, 25 bp, Probe sequence
cagtttgccacgtatcttcaaaaga

SEQ ID NO: 266901 - DNA, 25 bp, Probe sequence
cttagatcatattcaatttttgcaa

SEQ ID NO: 266902 - DNA, 25 bp, Probe sequence
ccagtttgccacgtatcttcaaaag

SEQ ID NO: 266903 - DNA, 25 bp, Probe sequence
gccacgtatcttcaaaagagaaata

SEQ ID NO: 266904 - DNA, 25 bp, Probe sequence
gaaataacttagatcatattcaatt

SEQ ID NO: 266905 - DNA, 25 bp, Probe sequence
gagaaataacttagatcatattcaa

SEQ ID NO: 266906 - DNA, 25 bp, Probe sequence
gagagtggtgtaaaattgaattatt

SEQ ID NO: 266907 - DNA, 25 bp, Probe sequence
gaggagagtggtgtaaaattgaatt

SEQ ID NO: 266908 - DNA, 25 bp, Probe sequence
gatcatattcaatttttgcaagtac

SEQ ID NO: 266909 - DNA, 25 bp, Probe sequence
gtttgccacgtatcttcaaaagaga

SEQ ID NO: 266910 - DNA, 25 bp, Probe sequence
gtgaggagagtggtgtaaaattgaa

SEQ ID NO: 266911 - DNA, 25 bp, Probe sequence
ggagagtggtgtaaaattgaattat

SEQ ID NO: 266912 - DNA, 25 bp, Probe sequence
tgaggagagtggtgtaaaattgaat

SEQ ID NO: 266913 - DNA, 25 bp, Probe sequence
tgccacgtatcttcaaaagagaaat

SEQ ID NO: 266914 - DNA, 25 bp, Probe sequence
taacttagatcatattcaatttttg

SEQ ID NO: 266915 - DNA, 25 bp, Probe sequence
tagatcatattcaatttttgcaagt

SEQ ID NO: 266916 - DNA, 25 bp, Probe sequence
tttgccacgtatcttcaaaagagaa

SEQ ID NO: 266917 - DNA, 25 bp, Probe sequence
ttagatcatattcaatttttgcaag

SEQ ID NO: 266918 - DNA, 25 bp, Probe sequence
ttgccacgtatcttcaaaagagaaa

SEQ ID NO: 266919 - DNA, 25 bp, Probe sequence
ataaattagtactgtcaacgcctct

SEQ ID NO: 266920 - DNA, 25 bp, Probe sequence
atgttaagtttgtgtattgaaagtg

SEQ ID NO: 266921 - DNA, 25 bp, Probe sequence
actgtcaacgcctctgttaaagggt

SEQ ID NO: 266922 - DNA, 25 bp, Probe sequence
agtgataaattagtactgtcaacgc

SEQ ID NO: 266923 - DNA, 25 bp, Probe sequence
agtttgtgtattgaaagtgataaat

SEQ ID NO: 266924 - DNA, 25 bp, Probe sequence
aaattagtactgtcaacgcctctgt

SEQ ID NO: 266925 - DNA, 25 bp, Probe sequence
aaagtgataaattagtactgtcaac

SEQ ID NO: 266926 - DNA, 25 bp, Probe sequence
aagtttgtgtattgaaagtgataaa

SEQ ID NO: 266927 - DNA, 25 bp, Probe sequence
aagtgataaattagtactgtcaacg

SEQ ID NO: 266928 - DNA, 25 bp, Probe sequence
ctgtcaacgcctctgttaaagggtt

SEQ ID NO: 266929 - DNA, 25 bp, Probe sequence
gaaagtgataaattagtactgtcaa

SEQ ID NO: 266930 - DNA, 25 bp, Probe sequence
gataaattagtactgtcaacgcctc

SEQ ID NO: 266931 - DNA, 25 bp, Probe sequence
gttaagtttgtgtattgaaagtgat

SEQ ID NO: 266932 - DNA, 25 bp, Probe sequence
gtttgtgtattgaaagtgataaatt

SEQ ID NO: 266933 - DNA, 25 bp, Probe sequence
gtactgtcaacgcctctgttaaagg

SEQ ID NO: 266934 - DNA, 25 bp, Probe sequence
gtgataaattagtactgtcaacgcc

SEQ ID NO: 266935 - DNA, 25 bp, Probe sequence
tgataaattagtactgtcaacgcct

SEQ ID NO: 266936 - DNA, 25 bp, Probe sequence
tgtcaacgcctctgttaaagggttt

SEQ ID NO: 266937 - DNA, 25 bp, Probe sequence
tgttaagtttgtgtattgaaagtga

SEQ ID NO: 266938 - DNA, 25 bp, Probe sequence
taaattagtactgtcaacgcctctg

SEQ ID NO: 266939 - DNA, 25 bp, Probe sequence
taagtttgtgtattgaaagtgataa

SEQ ID NO: 266940 - DNA, 25 bp, Probe sequence
tactgtcaacgcctctgttaaaggg

SEQ ID NO: 266941 - DNA, 25 bp, Probe sequence
ttagtactgtcaacgcctctgttaa

SEQ ID NO: 266942 - DNA, 25 bp, Probe sequence
ttaagtttgtgtattgaaagtgata

SEQ ID NO: 266943 - DNA, 25 bp, Probe sequence
attccattgtcattgcaggttattt

SEQ ID NO: 266944 - DNA, 25 bp, Probe sequence
atgcttgggccattaagacaaatca

SEQ ID NO: 266945 - DNA, 25 bp, Probe sequence
atcaatgctaacttttatgcttggg

SEQ ID NO: 266946 - DNA, 25 bp, Probe sequence
atcactgatttttatatggaacatt

SEQ ID NO: 266947 - DNA, 25 bp, Probe sequence
atgctaacttttatgcttgggccat

SEQ ID NO: 266948 - DNA, 25 bp, Probe sequence
atggtagaatcaatgctaactttta

SEQ ID NO: 266949 - DNA, 25 bp, Probe sequence
agtaattccattgtcattgcaggtt

SEQ ID NO: 266950 - DNA, 25 bp, Probe sequence
agaatcaatgctaacttttatgctt

SEQ ID NO: 266951 - DNA, 25 bp, Probe sequence
actcgtaagtaattccattgtcatt

SEQ ID NO: 266952 - DNA, 25 bp, Probe sequence
acttttatgcttgggccattaagac

SEQ ID NO: 266953 - DNA, 25 bp, Probe sequence
aagtaattccattgtcattgcaggt

SEQ ID NO: 266954 - DNA, 25 bp, Probe sequence
aatgctaacttttatgcttgggcca

SEQ ID NO: 266955 - DNA, 25 bp, Probe sequence
aattccattgtcattgcaggttatt

SEQ ID NO: 266956 - DNA, 25 bp, Probe sequence
caatgctaacttttatgcttgggcc

SEQ ID NO: 266957 - DNA, 25 bp, Probe sequence
caggttattttgcgacaggtatttt

SEQ ID NO: 266958 - DNA, 25 bp, Probe sequence
cattgcaggttattttgcgacaggt

SEQ ID NO: 266959 - DNA, 25 bp, Probe sequence
gctaacttttatgcttgggccatta

SEQ ID NO: 266960 - DNA, 25 bp, Probe sequence
gcttgggccattaagacaaatcact

SEQ ID NO: 266961 - DNA, 25 bp, Probe sequence
gaatcaatgctaacttttatgcttg

SEQ ID NO: 266962 - DNA, 25 bp, Probe sequence
gtaagtaattccattgtcattgcag

SEQ ID NO: 266963 - DNA, 25 bp, Probe sequence
gtaattccattgtcattgcaggtta

SEQ ID NO: 266964 - DNA, 25 bp, Probe sequence
gtcattgcaggttattttgcgacag

SEQ ID NO: 266965 - DNA, 25 bp, Probe sequence
ggccattaagacaaatcactgattt

SEQ ID NO: 266966 - DNA, 25 bp, Probe sequence
tgggccattaagacaaatcactgat

SEQ ID NO: 266967 - DNA, 25 bp, Probe sequence
tgctaacttttatgcttgggccatt

SEQ ID NO: 266968 - DNA, 25 bp, Probe sequence
tccattgtcattgcaggttattttg

SEQ ID NO: 266969 - DNA, 25 bp, Probe sequence
tcgtaagtaattccattgtcattgc

SEQ ID NO: 266970 - DNA, 25 bp, Probe sequence
taattccattgtcattgcaggttat

SEQ ID NO: 266971 - DNA, 25 bp, Probe sequence
taacttttatgcttgggccattaag

SEQ ID NO: 266972 - DNA, 25 bp, Probe sequence
tactcgtaagtaattccattgtcat

SEQ ID NO: 266973 - DNA, 25 bp, Probe sequence
tatatggaacatttactcgtaagta

SEQ ID NO: 266974 - DNA, 25 bp, Probe sequence
ttttatgcttgggccattaagacaa

SEQ ID NO: 266975 - DNA, 25 bp, Probe sequence
ttgtcattgcaggttattttgcgac

SEQ ID NO: 266976 - DNA, 25 bp, Probe sequence
ttgcaggttattttgcgacaggtat

SEQ ID NO: 266977 - DNA, 25 bp, Probe sequence
atttgtaaaatgcatgcgttttcat

SEQ ID NO: 266978 - DNA, 25 bp, Probe sequence
atacacctcatgatttgtttttagt

SEQ ID NO: 266979 - DNA, 25 bp, Probe sequence
atgctcatgttatacacctcatgat

SEQ ID NO: 266980 - DNA, 25 bp, Probe sequence
atgcaacaatgctcatgttatacac

SEQ ID NO: 266981 - DNA, 25 bp, Probe sequence
atgttatacacctcatgatttgttt

SEQ ID NO: 266982 - DNA, 25 bp, Probe sequence
agtgccatcgtaccatttttatttg

SEQ ID NO: 266983 - DNA, 25 bp, Probe sequence
acacctcatgatttgtttttagtaa

SEQ ID NO: 266984 - DNA, 25 bp, Probe sequence
acaatgctcatgttatacacctcat

SEQ ID NO: 266985 - DNA, 25 bp, Probe sequence
aaaatgcatgcgttttcataaaaac

SEQ ID NO: 266986 - DNA, 25 bp, Probe sequence
aacaatgctcatgttatacacctca

SEQ ID NO: 266987 - DNA, 25 bp, Probe sequence
aatgctcatgttatacacctcatga

SEQ ID NO: 266988 - DNA, 25 bp, Probe sequence
caatgctcatgttatacacctcatg

SEQ ID NO: 266989 - DNA, 25 bp, Probe sequence
caacaatgctcatgttatacacctc

SEQ ID NO: 266990 - DNA, 25 bp, Probe sequence
cacctcatgatttgtttttagtaaa

SEQ ID NO: 266991 - DNA, 25 bp, Probe sequence
catgttatacacctcatgatttgtt

SEQ ID NO: 266992 - DNA, 25 bp, Probe sequence
ctcatgttatacacctcatgatttg

SEQ ID NO: 266993 - DNA, 25 bp, Probe sequence
gccatcgtaccatttttatttgtaa

SEQ ID NO: 266994 - DNA, 25 bp, Probe sequence
gctcatgttatacacctcatgattt

SEQ ID NO: 266995 - DNA, 25 bp, Probe sequence
gcaacaatgctcatgttatacacct

SEQ ID NO: 266996 - DNA, 25 bp, Probe sequence
gttatacacctcatgatttgttttt

SEQ ID NO: 266997 - DNA, 25 bp, Probe sequence
gtaaaacgttttaccagtgccatcg

SEQ ID NO: 266998 - DNA, 25 bp, Probe sequence
gtaaaatgcatgcgttttcataaaa

SEQ ID NO: 266999 - DNA, 25 bp, Probe sequence
gtgccatcgtaccatttttatttgt

SEQ ID NO: 267000 - DNA, 25 bp, Probe sequence
tgttatacacctcatgatttgtttt

SEQ ID NO: 267001 - DNA, 25 bp, Probe sequence
tgcaacaatgctcatgttatacacc

SEQ ID NO: 267002 - DNA, 25 bp, Probe sequence
tgctcatgttatacacctcatgatt

SEQ ID NO: 267003 - DNA, 25 bp, Probe sequence
tgccatcgtaccatttttatttgta

SEQ ID NO: 267004 - DNA, 25 bp, Probe sequence
taaaacgttttaccagtgccatcgt

SEQ ID NO: 267005 - DNA, 25 bp, Probe sequence
tacacctcatgatttgtttttagta

SEQ ID NO: 267006 - DNA, 25 bp, Probe sequence
tatacacctcatgatttgtttttag

SEQ ID NO: 267007 - DNA, 25 bp, Probe sequence
tttgtaaaatgcatgcgttttcata

SEQ ID NO: 267008 - DNA, 25 bp, Probe sequence
ttatttgtaaaatgcatgcgttttc

SEQ ID NO: 267009 - DNA, 25 bp, Probe sequence
ttatacacctcatgatttgttttta

SEQ ID NO: 267010 - DNA, 25 bp, Probe sequence
ttgtaaaatgcatgcgttttcataa

SEQ ID NO: 267011 - DNA, 25 bp, Probe sequence
atttctgtgcaagtatttgatgatt

SEQ ID NO: 267012 - DNA, 25 bp, Probe sequence
atattgattggataaattcagaatt

SEQ ID NO: 267013 - DNA, 25 bp, Probe sequence
atgataccggtagagtgggaaaaag

SEQ ID NO: 267014 - DNA, 25 bp, Probe sequence
aggtcgacaaaattactataagtat

SEQ ID NO: 267015 - DNA, 25 bp, Probe sequence
aaccaggtagtgatgacttgaatta

SEQ ID NO: 267016 - DNA, 25 bp, Probe sequence
aatggcttatatagatgatggagga

SEQ ID NO: 267017 - DNA, 25 bp, Probe sequence
ctaaaccaggtagtgatgacttgaa

SEQ ID NO: 267018 - DNA, 25 bp, Probe sequence
cctaaggagtataacatttctgtgc

SEQ ID NO: 267019 - DNA, 25 bp, Probe sequence
gaatttggtcaaataggtcgacaaa

SEQ ID NO: 267020 - DNA, 25 bp, Probe sequence
gcaagtatttgatgatttatggatg

SEQ ID NO: 267021 - DNA, 25 bp, Probe sequence
gaattattacaccaatatacctaag

SEQ ID NO: 267022 - DNA, 25 bp, Probe sequence
gaaggtgaattaaaagtttcatttg

SEQ ID NO: 267023 - DNA, 25 bp, Probe sequence
gaagatttagaaccatggacatcat

SEQ ID NO: 267024 - DNA, 25 bp, Probe sequence
gaaccatggacatcatgcgaatttg

SEQ ID NO: 267025 - DNA, 25 bp, Probe sequence
gaagaagatttagaaccatggacat

SEQ ID NO: 267026 - DNA, 25 bp, Probe sequence
gaaatcgagcaatatattaaagagc

SEQ ID NO: 267027 - DNA, 25 bp, Probe sequence
gatgacttgaattattacaccaata

SEQ ID NO: 267028 - DNA, 25 bp, Probe sequence
gatttagaaccatggacatcatgcg

SEQ ID NO: 267029 - DNA, 25 bp, Probe sequence
gatttatttgaggagttaagagatt

SEQ ID NO: 267030 - DNA, 25 bp, Probe sequence
gtttcatttgattatattgattgga

SEQ ID NO: 267031 - DNA, 25 bp, Probe sequence
gtatttgatgatttatggatggatt

SEQ ID NO: 267032 - DNA, 25 bp, Probe sequence
ggtcaaataggtcgacaaaattact

SEQ ID NO: 267033 - DNA, 25 bp, Probe sequence
ggaattttaccagaaacggaatatg

SEQ ID NO: 267034 - DNA, 25 bp, Probe sequence
ggaggaggtgaagtattctttaatt

SEQ ID NO: 267035 - DNA, 25 bp, Probe sequence
ggaggtgaagtattctttaattata

SEQ ID NO: 267036 - DNA, 25 bp, Probe sequence
ggatggatttatatgatttatttga

SEQ ID NO: 267037 - DNA, 25 bp, Probe sequence
ggagtataacatttctgtgcaagta

SEQ ID NO: 267038 - DNA, 25 bp, Probe sequence
ggaaaaagtatatacaatggcttat

SEQ ID NO: 267039 - DNA, 25 bp, Probe sequence
ggacatcatgcgaatttgattttac

SEQ ID NO: 267040 - DNA, 25 bp, Probe sequence
tgatggaggaggtgaagtattcttt

SEQ ID NO: 267041 - DNA, 25 bp, Probe sequence
tcatgcgaatttgattttacaagag

SEQ ID NO: 267042 - DNA, 25 bp, Probe sequence
taacatttctgtgcaagtatttgat

SEQ ID NO: 267043 - DNA, 25 bp, Probe sequence
tattctttaattatactaaaccagg

SEQ ID NO: 267044 - DNA, 25 bp, Probe sequence
tattacaccaatatacctaaggagt

SEQ ID NO: 267045 - DNA, 25 bp, Probe sequence
ggggttttaccagaaatggaatatg

SEQ ID NO: 267046 - DNA, 25 bp, Probe sequence
attacaccgatatacctaaggagta

SEQ ID NO: 267047 - DNA, 25 bp, Probe sequence
atctctgtgcaagtatttgatgatt

SEQ ID NO: 267048 - DNA, 25 bp, Probe sequence
atgataccggtagagtgggaaaaag

SEQ ID NO: 267049 - DNA, 25 bp, Probe sequence
aggagtataacatctctgtgcaagt

SEQ ID NO: 267050 - DNA, 25 bp, Probe sequence
aagaaggacttgaaccatggacatc

SEQ ID NO: 267051 - DNA, 25 bp, Probe sequence
aatggcttatatagatgatggagga

SEQ ID NO: 267052 - DNA, 25 bp, Probe sequence
cagagtttgatcaattaggccgtga

SEQ ID NO: 267053 - DNA, 25 bp, Probe sequence
ctaaaccaggtagtgatgacttgaa

SEQ ID NO: 267054 - DNA, 25 bp, Probe sequence
cctaaggagtataacatctctgtgc

SEQ ID NO: 267055 - DNA, 25 bp, Probe sequence
gcaagtatttgatgatttatggatg

SEQ ID NO: 267056 - DNA, 25 bp, Probe sequence
gaattattacaccgatatacctaag

SEQ ID NO: 267057 - DNA, 25 bp, Probe sequence
gaatttgactttacaagcgaaggta

SEQ ID NO: 267058 - DNA, 25 bp, Probe sequence
gaaggacttgaaccatggacatcat

SEQ ID NO: 267059 - DNA, 25 bp, Probe sequence
gaaccatggacatcatgtgaatttg

SEQ ID NO: 267060 - DNA, 25 bp, Probe sequence
gaaatcgatcaatatattaaagagc

SEQ ID NO: 267061 - DNA, 25 bp, Probe sequence
gacttgaattattacaccgatatac

SEQ ID NO: 267062 - DNA, 25 bp, Probe sequence
gaggaggtgaagtattctttaatta

SEQ ID NO: 267063 - DNA, 25 bp, Probe sequence
gatgacttgaattattacaccgata

SEQ ID NO: 267064 - DNA, 25 bp, Probe sequence
gtttgatcaattaggccgtgaaaat

SEQ ID NO: 267065 - DNA, 25 bp, Probe sequence
gtttcatttgattatatagattgga

SEQ ID NO: 267066 - DNA, 25 bp, Probe sequence
gtatttgatgatttatggatggatt

SEQ ID NO: 267067 - DNA, 25 bp, Probe sequence
gtataacatctctgtgcaagtattt

SEQ ID NO: 267068 - DNA, 25 bp, Probe sequence
ggatttatatgatttgtttgaggaa

SEQ ID NO: 267069 - DNA, 25 bp, Probe sequence
ggatggatttatatgatttgtttga

SEQ ID NO: 267070 - DNA, 25 bp, Probe sequence
ggacttgaaccatggacatcatgtg

SEQ ID NO: 267071 - DNA, 25 bp, Probe sequence
ggaaaaagtatatacaatggcttat

SEQ ID NO: 267072 - DNA, 25 bp, Probe sequence
ggacatcatgtgaatttgactttac

SEQ ID NO: 267073 - DNA, 25 bp, Probe sequence
tgatggaggaggtgaagtattcttt

SEQ ID NO: 267074 - DNA, 25 bp, Probe sequence
tcatgtgaatttgactttacaagcg

SEQ ID NO: 267075 - DNA, 25 bp, Probe sequence
taacatctctgtgcaagtatttgat

SEQ ID NO: 267076 - DNA, 25 bp, Probe sequence
tagattggataaatacagagtttga

SEQ ID NO: 267077 - DNA, 25 bp, Probe sequence
taggccgtgaaaattattatatgta

SEQ ID NO: 267078 - DNA, 25 bp, Probe sequence
tattctttaattatactaaaccagg

SEQ ID NO: 267079 - DNA, 25 bp, Probe sequence
atttgctggagctcgaattattcgc

SEQ ID NO: 267080 - DNA, 25 bp, Probe sequence
atttcatctctatttgagccattaa

SEQ ID NO: 267081 - DNA, 25 bp, Probe sequence
atatctgcagaaacaattccaggtg

SEQ ID NO: 267082 - DNA, 25 bp, Probe sequence
atcaattggacttcgttcaacacga

SEQ ID NO: 267083 - DNA, 25 bp, Probe sequence
aggtgaaggatttgctggagctcga

SEQ ID NO: 267084 - DNA, 25 bp, Probe sequence
agacgtaattacaggattctttatt

SEQ ID NO: 267085 - DNA, 25 bp, Probe sequence
acacctcaaccaattatgactgctt

SEQ ID NO: 267086 - DNA, 25 bp, Probe sequence
aaagccaatttgatgtaggtgatta

SEQ ID NO: 267087 - DNA, 25 bp, Probe sequence
aaaacattgcaactaaaatcgctat

SEQ ID NO: 267088 - DNA, 25 bp, Probe sequence
aactttaatatctcttgttcaaaat

SEQ ID NO: 267089 - DNA, 25 bp, Probe sequence
aacacgaatcaatacaatttcagga

SEQ ID NO: 267090 - DNA, 25 bp, Probe sequence
aacgaactactcaattacaaatggt

SEQ ID NO: 267091 - DNA, 25 bp, Probe sequence
aacggtggtacaactgtagcagagg

SEQ ID NO: 267092 - DNA, 25 bp, Probe sequence
aagcgctctaaaactttaatatctc

SEQ ID NO: 267093 - DNA, 25 bp, Probe sequence
aatttggcattagtgttgaaggggt

SEQ ID NO: 267094 - DNA, 25 bp, Probe sequence
aatcgctatgattgttatttatatt

SEQ ID NO: 267095 - DNA, 25 bp, Probe sequence
cttatttgttagtgatccggttgtt

SEQ ID NO: 267096 - DNA, 25 bp, Probe sequence
ccagtgctggtgtcgtaggcttagc

SEQ ID NO: 267097 - DNA, 25 bp, Probe sequence
gaaggggtaattgccagtgctggtg

SEQ ID NO: 267098 - DNA, 25 bp, Probe sequence
gactgcttataatcatagtgaaaac

SEQ ID NO: 267099 - DNA, 25 bp, Probe sequence
gagggaacagttaaatcaattggac

SEQ ID NO: 267100 - DNA, 25 bp, Probe sequence
gtaggttttggtgctcaaactatag

SEQ ID NO: 267101 - DNA, 25 bp, Probe sequence
gttatttatattatcgtagccctca

SEQ ID NO: 267102 - DNA, 25 bp, Probe sequence
gtattaaaacacctcaaccaattat

SEQ ID NO: 267103 - DNA, 25 bp, Probe sequence
gtatgggtgaaataacgaactactc

SEQ ID NO: 267104 - DNA, 25 bp, Probe sequence
gtagtgaagtatatcgtttggttta

SEQ ID NO: 267105 - DNA, 25 bp, Probe sequence
gtaggcttagcagtaggttttggtg

SEQ ID NO: 267106 - DNA, 25 bp, Probe sequence
gtgatccggttgttattggtattga

SEQ ID NO: 267107 - DNA, 25 bp, Probe sequence
tggtttatagttattacgacgattt

SEQ ID NO: 267108 - DNA, 25 bp, Probe sequence
tgttattggtattgatgctattgaa

SEQ ID NO: 267109 - DNA, 25 bp, Probe sequence
tacaaatggtacagctatcgttaaa

SEQ ID NO: 267110 - DNA, 25 bp, Probe sequence
tatcgttaaaattccagtgtctgtc

SEQ ID NO: 267111 - DNA, 25 bp, Probe sequence
ttatcgtagccctcatagttattaa

SEQ ID NO: 267112 - DNA, 25 bp, Probe sequence
ttccagtgtctgtcgaagaaaacat

SEQ ID NO: 267113 - DNA, 25 bp, Probe sequence
attactttgtcaaaagaagcagcta

SEQ ID NO: 267114 - DNA, 25 bp, Probe sequence
atcgcaaaattcaaaccatttaaga

SEQ ID NO: 267115 - DNA, 25 bp, Probe sequence
agaagcagctatcatatttgcaatc

SEQ ID NO: 267116 - DNA, 25 bp, Probe sequence
agcagctatcatatttgcaatcgca

SEQ ID NO: 267117 - DNA, 25 bp, Probe sequence
agctatcatatttgcaatcgcaaaa

SEQ ID NO: 267118 - DNA, 25 bp, Probe sequence
actttgtcaaaagaagcagctatca

SEQ ID NO: 267119 - DNA, 25 bp, Probe sequence
acaaatccatttcttaaattacatg

SEQ ID NO: 267120 - DNA, 25 bp, Probe sequence
aaatccatttcttaaattacatgaa

SEQ ID NO: 267121 - DNA, 25 bp, Probe sequence
aaagaagcagctatcatatttgcaa

SEQ ID NO: 267122 - DNA, 25 bp, Probe sequence
aaaagaagcagctatcatatttgca

SEQ ID NO: 267123 - DNA, 25 bp, Probe sequence
aacaaatccatttcttaaattacat

SEQ ID NO: 267124 - DNA, 25 bp, Probe sequence
aagcagctatcatatttgcaatcgc

SEQ ID NO: 267125 - DNA, 25 bp, Probe sequence
aagaagcagctatcatatttgcaat

SEQ ID NO: 267126 - DNA, 25 bp, Probe sequence
aatcgcaaaattcaaaccatttaag

SEQ ID NO: 267127 - DNA, 25 bp, Probe sequence
aatccatttcttaaattacatgaaa

SEQ ID NO: 267128 - DNA, 25 bp, Probe sequence
caatcgcaaaattcaaaccatttaa

SEQ ID NO: 267129 - DNA, 25 bp, Probe sequence
caaatccatttcttaaattacatga

SEQ ID NO: 267130 - DNA, 25 bp, Probe sequence
cagctatcatatttgcaatcgcaaa

SEQ ID NO: 267131 - DNA, 25 bp, Probe sequence
ctttgtcaaaagaagcagctatcat

SEQ ID NO: 267132 - DNA, 25 bp, Probe sequence
ctattactttgtcaaaagaagcagc

SEQ ID NO: 267133 - DNA, 25 bp, Probe sequence
gctatcatatttgcaatcgcaaaat

SEQ ID NO: 267134 - DNA, 25 bp, Probe sequence
gcagctatcatatttgcaatcgcaa

SEQ ID NO: 267135 - DNA, 25 bp, Probe sequence
gcaaaattcaaaccatttaagaaca

SEQ ID NO: 267136 - DNA, 25 bp, Probe sequence
gcaatcgcaaaattcaaaccattta

SEQ ID NO: 267137 - DNA, 25 bp, Probe sequence
gaagcagctatcatatttgcaatcg

SEQ ID NO: 267138 - DNA, 25 bp, Probe sequence
gttctattactttgtcaaaagaagc

SEQ ID NO: 267139 - DNA, 25 bp, Probe sequence
gtcaaaagaagcagctatcatattt

SEQ ID NO: 267140 - DNA, 25 bp, Probe sequence
ggttctattactttgtcaaaagaag

SEQ ID NO: 267141 - DNA, 25 bp, Probe sequence
tggtaccagaagaaaaaggttctat

SEQ ID NO: 267142 - DNA, 25 bp, Probe sequence
tgcaatcgcaaaattcaaaccattt

SEQ ID NO: 267143 - DNA, 25 bp, Probe sequence
tccatttcttaaattacatgaaaac

SEQ ID NO: 267144 - DNA, 25 bp, Probe sequence
tcgcaaaattcaaaccatttaagaa

SEQ ID NO: 267145 - DNA, 25 bp, Probe sequence
ttcaaaccatttaagaacagaatta

SEQ ID NO: 267146 - DNA, 25 bp, Probe sequence
ttgcaatcgcaaaattcaaaccatt

SEQ ID NO: 267147 - DNA, 25 bp, Probe sequence
attgggataggattcatgacacaca

SEQ ID NO: 267148 - DNA, 25 bp, Probe sequence
attttacctttatggagattgggat

SEQ ID NO: 267149 - DNA, 25 bp, Probe sequence
ataggattcatgacacacaaaccaa

SEQ ID NO: 267150 - DNA, 25 bp, Probe sequence
atgacacacaaaccaaaacggctta

SEQ ID NO: 267151 - DNA, 25 bp, Probe sequence
aggattcatgacacacaaaccaaaa

SEQ ID NO: 267152 - DNA, 25 bp, Probe sequence
agaattttgatgttggtggtggaaa

SEQ ID NO: 267153 - DNA, 25 bp, Probe sequence
aaaacggcttaacgacgatatcgat

SEQ ID NO: 267154 - DNA, 25 bp, Probe sequence
caaaacggcttaacgacgatatcga

SEQ ID NO: 267155 - DNA, 25 bp, Probe sequence
catgacacacaaaccaaaacggctt

SEQ ID NO: 267156 - DNA, 25 bp, Probe sequence
ccaaaacggcttaacgacgatatcg

SEQ ID NO: 267157 - DNA, 25 bp, Probe sequence
gaaattttacctttatggagattgg

SEQ ID NO: 267158 - DNA, 25 bp, Probe sequence
gagaattttgatgttggtggtggaa

SEQ ID NO: 267159 - DNA, 25 bp, Probe sequence
gagattgggataggattcatgacac

SEQ ID NO: 267160 - DNA, 25 bp, Probe sequence
gatgttggtggtggaaattttacct

SEQ ID NO: 267161 - DNA, 25 bp, Probe sequence
gataggattcatgacacacaaacca

SEQ ID NO: 267162 - DNA, 25 bp, Probe sequence
gattcatgacacacaaaccaaaacg

SEQ ID NO: 267163 - DNA, 25 bp, Probe sequence
gattgggataggattcatgacacac

SEQ ID NO: 267164 - DNA, 25 bp, Probe sequence
gtggagaattttgatgttggtggtg

SEQ ID NO: 267165 - DNA, 25 bp, Probe sequence
gtggaaattttacctttatggagat

SEQ ID NO: 267166 - DNA, 25 bp, Probe sequence
gggataggattcatgacacacaaac

SEQ ID NO: 267167 - DNA, 25 bp, Probe sequence
ggattcatgacacacaaaccaaaac

SEQ ID NO: 267168 - DNA, 25 bp, Probe sequence
ggataggattcatgacacacaaacc

SEQ ID NO: 267169 - DNA, 25 bp, Probe sequence
ggagaattttgatgttggtggtgga

SEQ ID NO: 267170 - DNA, 25 bp, Probe sequence
ggaaattttacctttatggagattg

SEQ ID NO: 267171 - DNA, 25 bp, Probe sequence
tggtggtggaaattttacctttatg

SEQ ID NO: 267172 - DNA, 25 bp, Probe sequence
tggagattgggataggattcatgac

SEQ ID NO: 267173 - DNA, 25 bp, Probe sequence
tggtggaaattttacctttatggag

SEQ ID NO: 267174 - DNA, 25 bp, Probe sequence
tgggataggattcatgacacacaaa

SEQ ID NO: 267175 - DNA, 25 bp, Probe sequence
tgacacacaaaccaaaacggcttaa

SEQ ID NO: 267176 - DNA, 25 bp, Probe sequence
tcatgacacacaaaccaaaacggct

SEQ ID NO: 267177 - DNA, 25 bp, Probe sequence
tacctttatggagattgggatagga

SEQ ID NO: 267178 - DNA, 25 bp, Probe sequence
taggattcatgacacacaaaccaaa

SEQ ID NO: 267179 - DNA, 25 bp, Probe sequence
tttacctttatggagattgggatag

SEQ ID NO: 267180 - DNA, 25 bp, Probe sequence
ttcatgacacacaaaccaaaacggc

SEQ ID NO: 267181 - DNA, 25 bp, Probe sequence
attgctacattttattattcaagaa

SEQ ID NO: 267182 - DNA, 25 bp, Probe sequence
attatttggagtattgctacatttt

SEQ ID NO: 267183 - DNA, 25 bp, Probe sequence
atttggagtattgctacattttatt

SEQ ID NO: 267184 - DNA, 25 bp, Probe sequence
aggtactattatttggagtattgct

SEQ ID NO: 267185 - DNA, 25 bp, Probe sequence
agtattgctacattttattattcaa

SEQ ID NO: 267186 - DNA, 25 bp, Probe sequence
actattatttggagtattgctacat

SEQ ID NO: 267187 - DNA, 25 bp, Probe sequence
acattttattattcaagaatgatgg

SEQ ID NO: 267188 - DNA, 25 bp, Probe sequence
cattttattattcaagaatgatgga

SEQ ID NO: 267189 - DNA, 25 bp, Probe sequence
ctattatttggagtattgctacatt

SEQ ID NO: 267190 - DNA, 25 bp, Probe sequence
ctacattttattattcaagaatgat

SEQ ID NO: 267191 - DNA, 25 bp, Probe sequence
gctacattttattattcaagaatga

SEQ ID NO: 267192 - DNA, 25 bp, Probe sequence
gaaataatgaatttagctattttaa

SEQ ID NO: 267193 - DNA, 25 bp, Probe sequence
gagtattgctacattttattattca

SEQ ID NO: 267194 - DNA, 25 bp, Probe sequence
gtattgctacattttattattcaag

SEQ ID NO: 267195 - DNA, 25 bp, Probe sequence
gtactattatttggagtattgctac

SEQ ID NO: 267196 - DNA, 25 bp, Probe sequence
ggtactattatttggagtattgcta

SEQ ID NO: 267197 - DNA, 25 bp, Probe sequence
ggagtattgctacattttattattc

SEQ ID NO: 267198 - DNA, 25 bp, Probe sequence
tggagtattgctacattttattatt

SEQ ID NO: 267199 - DNA, 25 bp, Probe sequence
tgctacattttattattcaagaatg

SEQ ID NO: 267200 - DNA, 25 bp, Probe sequence
taatgaatttagctattttaaaaat

SEQ ID NO: 267201 - DNA, 25 bp, Probe sequence
tactattatttggagtattgctaca

SEQ ID NO: 267202 - DNA, 25 bp, Probe sequence
tacattttattattcaagaatgatg

SEQ ID NO: 267203 - DNA, 25 bp, Probe sequence
taggtactattatttggagtattgc

SEQ ID NO: 267204 - DNA, 25 bp, Probe sequence
tatttggagtattgctacattttat

SEQ ID NO: 267205 - DNA, 25 bp, Probe sequence
tattatttggagtattgctacattt

SEQ ID NO: 267206 - DNA, 25 bp, Probe sequence
tattgctacattttattattcaaga

SEQ ID NO: 267207 - DNA, 25 bp, Probe sequence
tttggagtattgctacattttatta

SEQ ID NO: 267208 - DNA, 25 bp, Probe sequence
ttatttggagtattgctacatttta

SEQ ID NO: 267209 - DNA, 25 bp, Probe sequence
ttgctacattttattattcaagaat

SEQ ID NO: 267210 - DNA, 25 bp, Probe sequence
ttggagtattgctacattttattat

SEQ ID NO: 267211 - DNA, 25 bp, Probe sequence
attctgctacaaggactttgcactt

SEQ ID NO: 267212 - DNA, 25 bp, Probe sequence
atgagttgtgttcattctgctacaa

SEQ ID NO: 267213 - DNA, 25 bp, Probe sequence
aggactttgcacttaatcgaaatta

SEQ ID NO: 267214 - DNA, 25 bp, Probe sequence
agttgtgttcattctgctacaagga

SEQ ID NO: 267215 - DNA, 25 bp, Probe sequence
acaaggactttgcacttaatcgaaa

SEQ ID NO: 267216 - DNA, 25 bp, Probe sequence
aaatgagttgtgttcattctgctac

SEQ ID NO: 267217 - DNA, 25 bp, Probe sequence
aaaatactatagttgcaatgtacca

SEQ ID NO: 267218 - DNA, 25 bp, Probe sequence
aaggactttgcacttaatcgaaatt

SEQ ID NO: 267219 - DNA, 25 bp, Probe sequence
aatgagttgtgttcattctgctaca

SEQ ID NO: 267220 - DNA, 25 bp, Probe sequence
aatactatagttgcaatgtaccaaa

SEQ ID NO: 267221 - DNA, 25 bp, Probe sequence
caaggactttgcacttaatcgaaat

SEQ ID NO: 267222 - DNA, 25 bp, Probe sequence
ctacaaggactttgcacttaatcga

SEQ ID NO: 267223 - DNA, 25 bp, Probe sequence
cattctgctacaaggactttgcact

SEQ ID NO: 267224 - DNA, 25 bp, Probe sequence
ctgctacaaggactttgcacttaat

SEQ ID NO: 267225 - DNA, 25 bp, Probe sequence
gctacaaggactttgcacttaatcg

SEQ ID NO: 267226 - DNA, 25 bp, Probe sequence
gcacttaatcgaaattattttttat

SEQ ID NO: 267227 - DNA, 25 bp, Probe sequence
gaaaatgagttgtgttcattctgct

SEQ ID NO: 267228 - DNA, 25 bp, Probe sequence
gactttgcacttaatcgaaattatt

SEQ ID NO: 267229 - DNA, 25 bp, Probe sequence
gagttgtgttcattctgctacaagg

SEQ ID NO: 267230 - DNA, 25 bp, Probe sequence
gttgtgttcattctgctacaaggac

SEQ ID NO: 267231 - DNA, 25 bp, Probe sequence
gttcattctgctacaaggactttgc

SEQ ID NO: 267232 - DNA, 25 bp, Probe sequence
gtgttcattctgctacaaggacttt

SEQ ID NO: 267233 - DNA, 25 bp, Probe sequence
ggactttgcacttaatcgaaattat

SEQ ID NO: 267234 - DNA, 25 bp, Probe sequence
tgtgttcattctgctacaaggactt

SEQ ID NO: 267235 - DNA, 25 bp, Probe sequence
tgttcattctgctacaaggactttg

SEQ ID NO: 267236 - DNA, 25 bp, Probe sequence
tgagttgtgttcattctgctacaag

SEQ ID NO: 267237 - DNA, 25 bp, Probe sequence
tgctacaaggactttgcacttaatc

SEQ ID NO: 267238 - DNA, 25 bp, Probe sequence
tctgctacaaggactttgcacttaa

SEQ ID NO: 267239 - DNA, 25 bp, Probe sequence
tcattctgctacaaggactttgcac

SEQ ID NO: 267240 - DNA, 25 bp, Probe sequence
tacaaggactttgcacttaatcgaa

SEQ ID NO: 267241 - DNA, 25 bp, Probe sequence
tactatagttgcaatgtaccaaatt

SEQ ID NO: 267242 - DNA, 25 bp, Probe sequence
ttgtgttcattctgctacaaggact

SEQ ID NO: 267243 - DNA, 25 bp, Probe sequence
ttcattctgctacaaggactttgca

SEQ ID NO: 267244 - DNA, 25 bp, Probe sequence
ttctgctacaaggactttgcactta

SEQ ID NO: 267245 - DNA, 25 bp, Probe sequence
attatgttagattcacaattagatg

SEQ ID NO: 267246 - DNA, 25 bp, Probe sequence
attttaattatgttagattcacaat

SEQ ID NO: 267247 - DNA, 25 bp, Probe sequence
atgattttaattatgttagattcac

SEQ ID NO: 267248 - DNA, 25 bp, Probe sequence
atgttagattcacaattagatggaa

SEQ ID NO: 267249 - DNA, 25 bp, Probe sequence
agattcacaattagatggaaatgta

SEQ ID NO: 267250 - DNA, 25 bp, Probe sequence
agaattgagtgaatcttttaaagaa

SEQ ID NO: 267251 - DNA, 25 bp, Probe sequence
actgcaaaagaattgagtgaatctt

SEQ ID NO: 267252 - DNA, 25 bp, Probe sequence
acaattagatggaaatgtaactgca

SEQ ID NO: 267253 - DNA, 25 bp, Probe sequence
aactgcaaaagaattgagtgaatct

SEQ ID NO: 267254 - DNA, 25 bp, Probe sequence
aattagatggaaatgtaactgcaaa

SEQ ID NO: 267255 - DNA, 25 bp, Probe sequence
aattatgttagattcacaattagat

SEQ ID NO: 267256 - DNA, 25 bp, Probe sequence
aattgagtgaatcttttaaagaatt

SEQ ID NO: 267257 - DNA, 25 bp, Probe sequence
caattagatggaaatgtaactgcaa

SEQ ID NO: 267258 - DNA, 25 bp, Probe sequence
cacaattagatggaaatgtaactgc

SEQ ID NO: 267259 - DNA, 25 bp, Probe sequence
gaattgagtgaatcttttaaagaat

SEQ ID NO: 267260 - DNA, 25 bp, Probe sequence
gagtgaatcttttaaagaattagtt

SEQ ID NO: 267261 - DNA, 25 bp, Probe sequence
gattttaattatgttagattcacaa

SEQ ID NO: 267262 - DNA, 25 bp, Probe sequence
gattcacaattagatggaaatgtaa

SEQ ID NO: 267263 - DNA, 25 bp, Probe sequence
gttagattcacaattagatggaaat

SEQ ID NO: 267264 - DNA, 25 bp, Probe sequence
gtaactgcaaaagaattgagtgaat

SEQ ID NO: 267265 - DNA, 25 bp, Probe sequence
tgtaactgcaaaagaattgagtgaa

SEQ ID NO: 267266 - DNA, 25 bp, Probe sequence
tgttagattcacaattagatggaaa

SEQ ID NO: 267267 - DNA, 25 bp, Probe sequence
tgattttaattatgttagattcaca

SEQ ID NO: 267268 - DNA, 25 bp, Probe sequence
tcacaattagatggaaatgtaactg

SEQ ID NO: 267269 - DNA, 25 bp, Probe sequence
taattatgttagattcacaattaga

SEQ ID NO: 267270 - DNA, 25 bp, Probe sequence
taactgcaaaagaattgagtgaatc

SEQ ID NO: 267271 - DNA, 25 bp, Probe sequence
tagattcacaattagatggaaatgt

SEQ ID NO: 267272 - DNA, 25 bp, Probe sequence
tatgttagattcacaattagatgga

SEQ ID NO: 267273 - DNA, 25 bp, Probe sequence
tttaattatgttagattcacaatta

SEQ ID NO: 267274 - DNA, 25 bp, Probe sequence
ttttaattatgttagattcacaatt

SEQ ID NO: 267275 - DNA, 25 bp, Probe sequence
ttatgttagattcacaattagatgg

SEQ ID NO: 267276 - DNA, 25 bp, Probe sequence
ttagattcacaattagatggaaatg

SEQ ID NO: 267277 - DNA, 25 bp, Probe sequence
ttcacaattagatggaaatgtaact

SEQ ID NO: 267278 - DNA, 25 bp, Probe sequence
ttaattatgttagattcacaattag

SEQ ID NO: 267279 - DNA, 25 bp, Probe sequence
ataaaacaccacaatcaacaaattt

SEQ ID NO: 267280 - DNA, 25 bp, Probe sequence
atcaacaaatttaacgaggaagaat

SEQ ID NO: 267281 - DNA, 25 bp, Probe sequence
aggtcttttctcgaatattggcata

SEQ ID NO: 267282 - DNA, 25 bp, Probe sequence
agataaaacaccacaatcaacaaat

SEQ ID NO: 267283 - DNA, 25 bp, Probe sequence
accacaatcaacaaatttaacgagg

SEQ ID NO: 267284 - DNA, 25 bp, Probe sequence
acaaggtcttttctcgaatattggc

SEQ ID NO: 267285 - DNA, 25 bp, Probe sequence
acaccacaatcaacaaatttaacga

SEQ ID NO: 267286 - DNA, 25 bp, Probe sequence
acaatcaacaaatttaacgaggaag

SEQ ID NO: 267287 - DNA, 25 bp, Probe sequence
aaagataaaacaccacaatcaacaa

SEQ ID NO: 267288 - DNA, 25 bp, Probe sequence
aacaaggtcttttctcgaatattgg

SEQ ID NO: 267289 - DNA, 25 bp, Probe sequence
aacaccacaatcaacaaatttaacg

SEQ ID NO: 267290 - DNA, 25 bp, Probe sequence
aagataaaacaccacaatcaacaaa

SEQ ID NO: 267291 - DNA, 25 bp, Probe sequence
aaggtcttttctcgaatattggcat

SEQ ID NO: 267292 - DNA, 25 bp, Probe sequence
caatcaacaaatttaacgaggaaga

SEQ ID NO: 267293 - DNA, 25 bp, Probe sequence
caaggtcttttctcgaatattggca

SEQ ID NO: 267294 - DNA, 25 bp, Probe sequence
cacaatcaacaaatttaacgaggaa

SEQ ID NO: 267295 - DNA, 25 bp, Probe sequence
caccacaatcaacaaatttaacgag

SEQ ID NO: 267296 - DNA, 25 bp, Probe sequence
cttttctcgaatattggcatatcaa

SEQ ID NO: 267297 - DNA, 25 bp, Probe sequence
ccacaatcaacaaatttaacgagga

SEQ ID NO: 267298 - DNA, 25 bp, Probe sequence
gataaaacaccacaatcaacaaatt

SEQ ID NO: 267299 - DNA, 25 bp, Probe sequence
gtcttttctcgaatattggcatatc

SEQ ID NO: 267300 - DNA, 25 bp, Probe sequence
ggtcttttctcgaatattggcatat

SEQ ID NO: 267301 - DNA, 25 bp, Probe sequence
tgttatttaacaaggtcttttctcg

SEQ ID NO: 267302 - DNA, 25 bp, Probe sequence
tcttttctcgaatattggcatatca

SEQ ID NO: 267303 - DNA, 25 bp, Probe sequence
tcaacaaatttaacgaggaagaata

SEQ ID NO: 267304 - DNA, 25 bp, Probe sequence
tcaatttaactttttaaatagtcat

SEQ ID NO: 267305 - DNA, 25 bp, Probe sequence
taacaaggtcttttctcgaatattg

SEQ ID NO: 267306 - DNA, 25 bp, Probe sequence
taaaacaccacaatcaacaaattta

SEQ ID NO: 267307 - DNA, 25 bp, Probe sequence
tatttaacaaggtcttttctcgaat

SEQ ID NO: 267308 - DNA, 25 bp, Probe sequence
tttctcgaatattggcatatcaatt

SEQ ID NO: 267309 - DNA, 25 bp, Probe sequence
tttaacaaggtcttttctcgaatat

SEQ ID NO: 267310 - DNA, 25 bp, Probe sequence
ttttctcgaatattggcatatcaat

SEQ ID NO: 267311 - DNA, 25 bp, Probe sequence
ttaacaaggtcttttctcgaatatt

SEQ ID NO: 267312 - DNA, 25 bp, Probe sequence
ttctcgaatattggcatatcaattt

SEQ ID NO: 267313 - DNA, 25 bp, Probe sequence
atatacaggatcgaataacgaagag

SEQ ID NO: 267314 - DNA, 25 bp, Probe sequence
atagcgataatgaacaagttaaaaa

SEQ ID NO: 267315 - DNA, 25 bp, Probe sequence
atacaggatcgaataacgaagagaa

SEQ ID NO: 267316 - DNA, 25 bp, Probe sequence
ataaatgaatatacaggatcgaata

SEQ ID NO: 267317 - DNA, 25 bp, Probe sequence
ataaagctaaagacgcagtagaaaa

SEQ ID NO: 267318 - DNA, 25 bp, Probe sequence
atgaatatacaggatcgaataacga

SEQ ID NO: 267319 - DNA, 25 bp, Probe sequence
atggataaagctaaagacgcagtag

SEQ ID NO: 267320 - DNA, 25 bp, Probe sequence
agctaaagacgcagtagaaaaattt

SEQ ID NO: 267321 - DNA, 25 bp, Probe sequence
acaggatcgaataacgaagagaaaa

SEQ ID NO: 267322 - DNA, 25 bp, Probe sequence
aaatagcgataatgaacaagttaaa

SEQ ID NO: 267323 - DNA, 25 bp, Probe sequence
aaatgaatatacaggatcgaataac

SEQ ID NO: 267324 - DNA, 25 bp, Probe sequence
aaagctaaagacgcagtagaaaaat

SEQ ID NO: 267325 - DNA, 25 bp, Probe sequence
aaaaatagcgataatgaacaagtta

SEQ ID NO: 267326 - DNA, 25 bp, Probe sequence
aaaatagcgataatgaacaagttaa

SEQ ID NO: 267327 - DNA, 25 bp, Probe sequence
aagctaaagacgcagtagaaaaatt

SEQ ID NO: 267328 - DNA, 25 bp, Probe sequence
aatgaatatacaggatcgaataacg

SEQ ID NO: 267329 - DNA, 25 bp, Probe sequence
aatagcgataatgaacaagttaaaa

SEQ ID NO: 267330 - DNA, 25 bp, Probe sequence
aatatacaggatcgaataacgaaga

SEQ ID NO: 267331 - DNA, 25 bp, Probe sequence
gctaaagacgcagtagaaaaattta

SEQ ID NO: 267332 - DNA, 25 bp, Probe sequence
gaatatacaggatcgaataacgaag

SEQ ID NO: 267333 - DNA, 25 bp, Probe sequence
gataaagctaaagacgcagtagaaa

SEQ ID NO: 267334 - DNA, 25 bp, Probe sequence
gataaatgaatatacaggatcgaat

SEQ ID NO: 267335 - DNA, 25 bp, Probe sequence
gttttatggataaagctaaagacgc

SEQ ID NO: 267336 - DNA, 25 bp, Probe sequence
ggataaagctaaagacgcagtagaa

SEQ ID NO: 267337 - DNA, 25 bp, Probe sequence
tggataaagctaaagacgcagtaga

SEQ ID NO: 267338 - DNA, 25 bp, Probe sequence
tgaatatacaggatcgaataacgaa

SEQ ID NO: 267339 - DNA, 25 bp, Probe sequence
taaagctaaagacgcagtagaaaaa

SEQ ID NO: 267340 - DNA, 25 bp, Probe sequence
taaaaatagcgataatgaacaagtt

SEQ ID NO: 267341 - DNA, 25 bp, Probe sequence
taaatgaatatacaggatcgaataa

SEQ ID NO: 267342 - DNA, 25 bp, Probe sequence
tacaggatcgaataacgaagagaaa

SEQ ID NO: 267343 - DNA, 25 bp, Probe sequence
tatggataaagctaaagacgcagta

SEQ ID NO: 267344 - DNA, 25 bp, Probe sequence
tatacaggatcgaataacgaagaga

SEQ ID NO: 267345 - DNA, 25 bp, Probe sequence
ttttatggataaagctaaagacgca

SEQ ID NO: 267346 - DNA, 25 bp, Probe sequence
ttatggataaagctaaagacgcagt

SEQ ID NO: 267347 - DNA, 25 bp, Probe sequence
atgtctaaagacaaagatccaaaat

SEQ ID NO: 267348 - DNA, 25 bp, Probe sequence
atggaacaaatctctgatcaaaatg

SEQ ID NO: 267349 - DNA, 25 bp, Probe sequence
agtatggtaacggattttgaagatt

SEQ ID NO: 267350 - DNA, 25 bp, Probe sequence
agaagaaaacagtatggtaacggat

SEQ ID NO: 267351 - DNA, 25 bp, Probe sequence
agatccaaaattaaattatcatgaa

SEQ ID NO: 267352 - DNA, 25 bp, Probe sequence
agacaaagatccaaaattaaattat

SEQ ID NO: 267353 - DNA, 25 bp, Probe sequence
agaaatggaacaaatctctgatcaa

SEQ ID NO: 267354 - DNA, 25 bp, Probe sequence
gacaaagatccaaaattaaattatc

SEQ ID NO: 267355 - DNA, 25 bp, Probe sequence
acagtatggtaacggattttgaaga

SEQ ID NO: 267356 - DNA, 25 bp, Probe sequence
acaaatctctgatcaaaatgatcaa

SEQ ID NO: 267357 - DNA, 25 bp, Probe sequence
aaatctctgatcaaaatgatcaaga

SEQ ID NO: 267358 - DNA, 25 bp, Probe sequence
aaatggaacaaatctctgatcaaaa

SEQ ID NO: 267359 - DNA, 25 bp, Probe sequence
aaagaaatggaacaaatctctgatc

SEQ ID NO: 267360 - DNA, 25 bp, Probe sequence
aaagatccaaaattaaattatcatg

SEQ ID NO: 267361 - DNA, 25 bp, Probe sequence
aaagaattctgaagaagacagtcag

SEQ ID NO: 267362 - DNA, 25 bp, Probe sequence
aaaagaattctgaagaagacagtca

SEQ ID NO: 267363 - DNA, 25 bp, Probe sequence
aacaaatctctgatcaaaatgatca

SEQ ID NO: 267364 - DNA, 25 bp, Probe sequence
aacagtatggtaacggattttgaag

SEQ ID NO: 267365 - DNA, 25 bp, Probe sequence
aagaaatggaacaaatctctgatca

SEQ ID NO: 267366 - DNA, 25 bp, Probe sequence
aagatccaaaattaaattatcatga

SEQ ID NO: 267367 - DNA, 25 bp, Probe sequence
aatggaacaaatctctgatcaaaat

SEQ ID NO: 267368 - DNA, 25 bp, Probe sequence
cagtatggtaacggattttgaagat

SEQ ID NO: 267369 - DNA, 25 bp, Probe sequence
gaagaaaacagtatggtaacggatt

SEQ ID NO: 267370 - DNA, 25 bp, Probe sequence
gaagaagaaaacagtatggtaacgg

SEQ ID NO: 267371 - DNA, 25 bp, Probe sequence
gaacaaatctctgatcaaaatgatc

SEQ ID NO: 267372 - DNA, 25 bp, Probe sequence
gaaaacagtatggtaacggattttg

SEQ ID NO: 267373 - DNA, 25 bp, Probe sequence
gaaatggaacaaatctctgatcaaa

SEQ ID NO: 267374 - DNA, 25 bp, Probe sequence
gatccaaaattaaattatcatgaag

SEQ ID NO: 267375 - DNA, 25 bp, Probe sequence
gtatggtaacggattttgaagattt

SEQ ID NO: 267376 - DNA, 25 bp, Probe sequence
gtctaaagacaaagatccaaaatta

SEQ ID NO: 267377 - DNA, 25 bp, Probe sequence
ggaacaaatctctgatcaaaatgat

SEQ ID NO: 267378 - DNA, 25 bp, Probe sequence
tggaacaaatctctgatcaaaatga

SEQ ID NO: 267379 - DNA, 25 bp, Probe sequence
tctaaagacaaagatccaaaattaa

SEQ ID NO: 267380 - DNA, 25 bp, Probe sequence
tatggtaacggattttgaagattta

SEQ ID NO: 267381 - DNA, 25 bp, Probe sequence
attggtaacatcgcagcttatagta

SEQ ID NO: 267382 - DNA, 25 bp, Probe sequence
atagtacttgtgacttcataatgga

SEQ ID NO: 267383 - DNA, 25 bp, Probe sequence
atcgcagcttatagtacttgtgact

SEQ ID NO: 267384 - DNA, 25 bp, Probe sequence
atgaatacattatttaacttatttt

SEQ ID NO: 267385 - DNA, 25 bp, Probe sequence
agtacttgtgacttcataatggatg

SEQ ID NO: 267386 - DNA, 25 bp, Probe sequence
agcttatagtacttgtgacttcata

SEQ ID NO: 267387 - DNA, 25 bp, Probe sequence
acattggtaacatcgcagcttatag

SEQ ID NO: 267388 - DNA, 25 bp, Probe sequence
acatcgcagcttatagtacttgtga

SEQ ID NO: 267389 - DNA, 25 bp, Probe sequence
aaacattggtaacatcgcagcttat

SEQ ID NO: 267390 - DNA, 25 bp, Probe sequence
aaaaacattggtaacatcgcagctt

SEQ ID NO: 267391 - DNA, 25 bp, Probe sequence
aaaacattggtaacatcgcagctta

SEQ ID NO: 267392 - DNA, 25 bp, Probe sequence
aacatcgcagcttatagtacttgtg

SEQ ID NO: 267393 - DNA, 25 bp, Probe sequence
aacattggtaacatcgcagcttata

SEQ ID NO: 267394 - DNA, 25 bp, Probe sequence
cagcttatagtacttgtgacttcat

SEQ ID NO: 267395 - DNA, 25 bp, Probe sequence
catcgcagcttatagtacttgtgac

SEQ ID NO: 267396 - DNA, 25 bp, Probe sequence
cattggtaacatcgcagcttatagt

SEQ ID NO: 267397 - DNA, 25 bp, Probe sequence
cttatagtacttgtgacttcataat

SEQ ID NO: 267398 - DNA, 25 bp, Probe sequence
cgcagcttatagtacttgtgacttc

SEQ ID NO: 267399 - DNA, 25 bp, Probe sequence
gcttatagtacttgtgacttcataa

SEQ ID NO: 267400 - DNA, 25 bp, Probe sequence
gcagcttatagtacttgtgacttca

SEQ ID NO: 267401 - DNA, 25 bp, Probe sequence
gtacttgtgacttcataatggatga

SEQ ID NO: 267402 - DNA, 25 bp, Probe sequence
gtaacatcgcagcttatagtacttg

SEQ ID NO: 267403 - DNA, 25 bp, Probe sequence
ggtaacatcgcagcttatagtactt

SEQ ID NO: 267404 - DNA, 25 bp, Probe sequence
tggtaacatcgcagcttatagtact

SEQ ID NO: 267405 - DNA, 25 bp, Probe sequence
tggatgaagttgaagtaccaaaaga

SEQ ID NO: 267406 - DNA, 25 bp, Probe sequence
tgaatacattatttaacttattttt

SEQ ID NO: 267407 - DNA, 25 bp, Probe sequence
tcgcagcttatagtacttgtgactt

SEQ ID NO: 267408 - DNA, 25 bp, Probe sequence
taatggatgaagttgaagtaccaaa

SEQ ID NO: 267409 - DNA, 25 bp, Probe sequence
taacatcgcagcttatagtacttgt

SEQ ID NO: 267410 - DNA, 25 bp, Probe sequence
tacttgtgacttcataatggatgaa

SEQ ID NO: 267411 - DNA, 25 bp, Probe sequence
tagtacttgtgacttcataatggat

SEQ ID NO: 267412 - DNA, 25 bp, Probe sequence
tatagtacttgtgacttcataatgg

SEQ ID NO: 267413 - DNA, 25 bp, Probe sequence
ttatagtacttgtgacttcataatg

SEQ ID NO: 267414 - DNA, 25 bp, Probe sequence
ttggtaacatcgcagcttatagtac

SEQ ID NO: 267415 - DNA, 25 bp, Probe sequence
attatcaatttgagcacgttaatga

SEQ ID NO: 267416 - DNA, 25 bp, Probe sequence
atttgagcacgttaatgaaagaaat

SEQ ID NO: 267417 - DNA, 25 bp, Probe sequence
atagtataatggctttaaatgataa

SEQ ID NO: 267418 - DNA, 25 bp, Probe sequence
ataatggctttaaatgataataatt

SEQ ID NO: 267419 - DNA, 25 bp, Probe sequence
atcaatttgagcacgttaatgaaag

SEQ ID NO: 267420 - DNA, 25 bp, Probe sequence
atgcgatttattttaacaatataaa

SEQ ID NO: 267421 - DNA, 25 bp, Probe sequence
atggctaactatgcgatttatttta

SEQ ID NO: 267422 - DNA, 25 bp, Probe sequence
agtataatggctttaaatgataata

SEQ ID NO: 267423 - DNA, 25 bp, Probe sequence
agcacgttaatgaaagaaatgaata

SEQ ID NO: 267424 - DNA, 25 bp, Probe sequence
actatgcgatttattttaacaatat

SEQ ID NO: 267425 - DNA, 25 bp, Probe sequence
aactatgcgatttattttaacaata

SEQ ID NO: 267426 - DNA, 25 bp, Probe sequence
aatagtataatggctttaaatgata

SEQ ID NO: 267427 - DNA, 25 bp, Probe sequence
aatttgagcacgttaatgaaagaaa

SEQ ID NO: 267428 - DNA, 25 bp, Probe sequence
caatttgagcacgttaatgaaagaa

SEQ ID NO: 267429 - DNA, 25 bp, Probe sequence
ctatgcgatttattttaacaatata

SEQ ID NO: 267430 - DNA, 25 bp, Probe sequence
ctaactatgcgatttattttaacaa

SEQ ID NO: 267431 - DNA, 25 bp, Probe sequence
gctaactatgcgatttattttaaca

SEQ ID NO: 267432 - DNA, 25 bp, Probe sequence
gcacgttaatgaaagaaatgaatat

SEQ ID NO: 267433 - DNA, 25 bp, Probe sequence
gagcacgttaatgaaagaaatgaat

SEQ ID NO: 267434 - DNA, 25 bp, Probe sequence
gtataatggctttaaatgataataa

SEQ ID NO: 267435 - DNA, 25 bp, Probe sequence
ggctaactatgcgatttattttaac

SEQ ID NO: 267436 - DNA, 25 bp, Probe sequence
tggctaactatgcgatttattttaa

SEQ ID NO: 267437 - DNA, 25 bp, Probe sequence
tgagcacgttaatgaaagaaatgaa

SEQ ID NO: 267438 - DNA, 25 bp, Probe sequence
tcaatttgagcacgttaatgaaaga

SEQ ID NO: 267439 - DNA, 25 bp, Probe sequence
taatagtataatggctttaaatgat

SEQ ID NO: 267440 - DNA, 25 bp, Probe sequence
taatggctttaaatgataataatta

SEQ ID NO: 267441 - DNA, 25 bp, Probe sequence
taactatgcgatttattttaacaat

SEQ ID NO: 267442 - DNA, 25 bp, Probe sequence
tagtataatggctttaaatgataat

SEQ ID NO: 267443 - DNA, 25 bp, Probe sequence
tatgcgatttattttaacaatataa

SEQ ID NO: 267444 - DNA, 25 bp, Probe sequence
tatcaatttgagcacgttaatgaaa

SEQ ID NO: 267445 - DNA, 25 bp, Probe sequence
tataatggctttaaatgataataat

SEQ ID NO: 267446 - DNA, 25 bp, Probe sequence
tttgagcacgttaatgaaagaaatg

SEQ ID NO: 267447 - DNA, 25 bp, Probe sequence
ttatcaatttgagcacgttaatgaa

SEQ ID NO: 267448 - DNA, 25 bp, Probe sequence
ttgagcacgttaatgaaagaaatga

SEQ ID NO: 267449 - DNA, 25 bp, Probe sequence
attagatttacagactgctcgtcgt

SEQ ID NO: 267450 - DNA, 25 bp, Probe sequence
atttacagactgctcgtcgtaattt

SEQ ID NO: 267451 - DNA, 25 bp, Probe sequence
agatttacagactgctcgtcgtaat

SEQ ID NO: 267452 - DNA, 25 bp, Probe sequence
agactgctcgtcgtaatttaaatag

SEQ ID NO: 267453 - DNA, 25 bp, Probe sequence
agaaagcgtgctttaaagattatta

SEQ ID NO: 267454 - DNA, 25 bp, Probe sequence
agcgtgctttaaagattattaagca

SEQ ID NO: 267455 - DNA, 25 bp, Probe sequence
acagactgctcgtcgtaatttaaat

SEQ ID NO: 267456 - DNA, 25 bp, Probe sequence
actgctcgtcgtaatttaaatagcc

SEQ ID NO: 267457 - DNA, 25 bp, Probe sequence
acattaaaacaagaaagcgtgcttt

SEQ ID NO: 267458 - DNA, 25 bp, Probe sequence
acaagaaagcgtgctttaaagatta

SEQ ID NO: 267459 - DNA, 25 bp, Probe sequence
aaagcgtgctttaaagattattaag

SEQ ID NO: 267460 - DNA, 25 bp, Probe sequence
aaacaagaaagcgtgctttaaagat

SEQ ID NO: 267461 - DNA, 25 bp, Probe sequence
aacaagaaagcgtgctttaaagatt

SEQ ID NO: 267462 - DNA, 25 bp, Probe sequence
aacattaaaacaagaaagcgtgctt

SEQ ID NO: 267463 - DNA, 25 bp, Probe sequence
aagcgtgctttaaagattattaagc

SEQ ID NO: 267464 - DNA, 25 bp, Probe sequence
aagaaagcgtgctttaaagattatt

SEQ ID NO: 267465 - DNA, 25 bp, Probe sequence
caagaaagcgtgctttaaagattat

SEQ ID NO: 267466 - DNA, 25 bp, Probe sequence
cagactgctcgtcgtaatttaaata

SEQ ID NO: 267467 - DNA, 25 bp, Probe sequence
cattaaaacaagaaagcgtgcttta

SEQ ID NO: 267468 - DNA, 25 bp, Probe sequence
ctgctcgtcgtaatttaaatagccc

SEQ ID NO: 267469 - DNA, 25 bp, Probe sequence
gctcgtcgtaatttaaatagcccta

SEQ ID NO: 267470 - DNA, 25 bp, Probe sequence
gcgtgctttaaagattattaagcaa

SEQ ID NO: 267471 - DNA, 25 bp, Probe sequence
gaaagcgtgctttaaagattattaa

SEQ ID NO: 267472 - DNA, 25 bp, Probe sequence
gactgctcgtcgtaatttaaatagc

SEQ ID NO: 267473 - DNA, 25 bp, Probe sequence
gatttacagactgctcgtcgtaatt

SEQ ID NO: 267474 - DNA, 25 bp, Probe sequence
gtcgtaatttaaatagccctaacat

SEQ ID NO: 267475 - DNA, 25 bp, Probe sequence
tgctcgtcgtaatttaaatagccct

SEQ ID NO: 267476 - DNA, 25 bp, Probe sequence
tcgtaatttaaatagccctaacatt

SEQ ID NO: 267477 - DNA, 25 bp, Probe sequence
tacagactgctcgtcgtaatttaaa

SEQ ID NO: 267478 - DNA, 25 bp, Probe sequence
tagatttacagactgctcgtcgtaa

SEQ ID NO: 267479 - DNA, 25 bp, Probe sequence
tattaagcaacataaaagagcgaaa

SEQ ID NO: 267480 - DNA, 25 bp, Probe sequence
tttacagactgctcgtcgtaattta

SEQ ID NO: 267481 - DNA, 25 bp, Probe sequence
ttagatttacagactgctcgtcgta

SEQ ID NO: 267482 - DNA, 25 bp, Probe sequence
ttacagactgctcgtcgtaatttaa

SEQ ID NO: 267483 - DNA, 25 bp, Probe sequence
attagtagtggatgctggtcacaca

SEQ ID NO: 267484 - DNA, 25 bp, Probe sequence
atgctggtcacacaagaacttcaaa

SEQ ID NO: 267485 - DNA, 25 bp, Probe sequence
agtggatgctggtcacacaagaact

SEQ ID NO: 267486 - DNA, 25 bp, Probe sequence
agtagtggatgctggtcacacaaga

SEQ ID NO: 267487 - DNA, 25 bp, Probe sequence
agcagcggattttagcgttactgca

SEQ ID NO: 267488 - DNA, 25 bp, Probe sequence
agcggattttagcgttactgcaaat

SEQ ID NO: 267489 - DNA, 25 bp, Probe sequence
acttcaaatattaaagccctcagaa

SEQ ID NO: 267490 - DNA, 25 bp, Probe sequence
aaagcagcggattttagcgttactg

SEQ ID NO: 267491 - DNA, 25 bp, Probe sequence
aagcagcggattttagcgttactgc

SEQ ID NO: 267492 - DNA, 25 bp, Probe sequence
cagcggattttagcgttactgcaaa

SEQ ID NO: 267493 - DNA, 25 bp, Probe sequence
ctggtcacacaagaacttcaaatat

SEQ ID NO: 267494 - DNA, 25 bp, Probe sequence
gcgttactgcaaataattttatatt

SEQ ID NO: 267495 - DNA, 25 bp, Probe sequence
gcggattttagcgttactgcaaata

SEQ ID NO: 267496 - DNA, 25 bp, Probe sequence
gctggtcacacaagaacttcaaata

SEQ ID NO: 267497 - DNA, 25 bp, Probe sequence
gcagcggattttagcgttactgcaa

SEQ ID NO: 267498 - DNA, 25 bp, Probe sequence
gaacttcaaatattaaagccctcag

SEQ ID NO: 267499 - DNA, 25 bp, Probe sequence
gaaagcagcggattttagcgttact

SEQ ID NO: 267500 - DNA, 25 bp, Probe sequence
gatgctggtcacacaagaacttcaa

SEQ ID NO: 267501 - DNA, 25 bp, Probe sequence
gtagtggatgctggtcacacaagaa

SEQ ID NO: 267502 - DNA, 25 bp, Probe sequence
gtggatgctggtcacacaagaactt

SEQ ID NO: 267503 - DNA, 25 bp, Probe sequence
ggtcacacaagaacttcaaatatta

SEQ ID NO: 267504 - DNA, 25 bp, Probe sequence
ggatgctggtcacacaagaacttca

SEQ ID NO: 267505 - DNA, 25 bp, Probe sequence
ggattttagcgttactgcaaataat

SEQ ID NO: 267506 - DNA, 25 bp, Probe sequence
tggatgctggtcacacaagaacttc

SEQ ID NO: 267507 - DNA, 25 bp, Probe sequence
tgaaagcagcggattttagcgttac

SEQ ID NO: 267508 - DNA, 25 bp, Probe sequence
tgctggtcacacaagaacttcaaat

SEQ ID NO: 267509 - DNA, 25 bp, Probe sequence
tagcgttactgcaaataattttata

SEQ ID NO: 267510 - DNA, 25 bp, Probe sequence
tagtggatgctggtcacacaagaac

SEQ ID NO: 267511 - DNA, 25 bp, Probe sequence
tagtagtggatgctggtcacacaag

SEQ ID NO: 267512 - DNA, 25 bp, Probe sequence
ttttagcgttactgcaaataatttt

SEQ ID NO: 267513 - DNA, 25 bp, Probe sequence
ttatattagtagtggatgctggtca

SEQ ID NO: 267514 - DNA, 25 bp, Probe sequence
ttagtagtggatgctggtcacacaa

SEQ ID NO: 267515 - DNA, 25 bp, Probe sequence
ttcaaatattaaagccctcagaata

SEQ ID NO: 267516 - DNA, 25 bp, Probe sequence
ttgaaagcagcggattttagcgtta

SEQ ID NO: 267517 - DNA, 25 bp, Probe sequence
attcgcttgtagagccacaagaagc

SEQ ID NO: 267518 - DNA, 25 bp, Probe sequence
attactaagtcatgctttccacttt

SEQ ID NO: 267519 - DNA, 25 bp, Probe sequence
ataaggtttacggttgcattttgat

SEQ ID NO: 267520 - DNA, 25 bp, Probe sequence
atgctttccactttgcgggttagca

SEQ ID NO: 267521 - DNA, 25 bp, Probe sequence
aggtttacggttgcattttgataca

SEQ ID NO: 267522 - DNA, 25 bp, Probe sequence
acggacaactgcattcgcttgtaga

SEQ ID NO: 267523 - DNA, 25 bp, Probe sequence
actgcattcgcttgtagagccacaa

SEQ ID NO: 267524 - DNA, 25 bp, Probe sequence
acaactgcattcgcttgtagagcca

SEQ ID NO: 267525 - DNA, 25 bp, Probe sequence
acaacaaccgattactaagtcatgc

SEQ ID NO: 267526 - DNA, 25 bp, Probe sequence
acaaccgattactaagtcatgcttt

SEQ ID NO: 267527 - DNA, 25 bp, Probe sequence
aaccgattactaagtcatgctttcc

SEQ ID NO: 267528 - DNA, 25 bp, Probe sequence
aactgcattcgcttgtagagccaca

SEQ ID NO: 267529 - DNA, 25 bp, Probe sequence
aacggacaactgcattcgcttgtag

SEQ ID NO: 267530 - DNA, 25 bp, Probe sequence
caactgcattcgcttgtagagccac

SEQ ID NO: 267531 - DNA, 25 bp, Probe sequence
ctgcattcgcttgtagagccacaag

SEQ ID NO: 267532 - DNA, 25 bp, Probe sequence
cggacaactgcattcgcttgtagag

SEQ ID NO: 267533 - DNA, 25 bp, Probe sequence
cgattactaagtcatgctttccact

SEQ ID NO: 267534 - DNA, 25 bp, Probe sequence
ccgattactaagtcatgctttccac

SEQ ID NO: 267535 - DNA, 25 bp, Probe sequence
gcttgtagagccacaagaagcaact

SEQ ID NO: 267536 - DNA, 25 bp, Probe sequence
gcattcgcttgtagagccacaagaa

SEQ ID NO: 267537 - DNA, 25 bp, Probe sequence
gcattttgatacaacaaccgattac

SEQ ID NO: 267538 - DNA, 25 bp, Probe sequence
gacaactgcattcgcttgtagagcc

SEQ ID NO: 267539 - DNA, 25 bp, Probe sequence
gatacaacaaccgattactaagtca

SEQ ID NO: 267540 - DNA, 25 bp, Probe sequence
gattactaagtcatgctttccactt

SEQ ID NO: 267541 - DNA, 25 bp, Probe sequence
gttaacggacaactgcattcgcttg

SEQ ID NO: 267542 - DNA, 25 bp, Probe sequence
gtagttaacggacaactgcattcgc

SEQ ID NO: 267543 - DNA, 25 bp, Probe sequence
gtgaatgtagttaacggacaactgc

SEQ ID NO: 267544 - DNA, 25 bp, Probe sequence
ggtttacggttgcattttgatacaa

SEQ ID NO: 267545 - DNA, 25 bp, Probe sequence
ggacaactgcattcgcttgtagagc

SEQ ID NO: 267546 - DNA, 25 bp, Probe sequence
taacggacaactgcattcgcttgta

SEQ ID NO: 267547 - DNA, 25 bp, Probe sequence
tactaagtcatgctttccactttgc

SEQ ID NO: 267548 - DNA, 25 bp, Probe sequence
tacggttgcattttgatacaacaac

SEQ ID NO: 267549 - DNA, 25 bp, Probe sequence
ttaacggacaactgcattcgcttgt

SEQ ID NO: 267550 - DNA, 25 bp, Probe sequence
ttgcattttgatacaacaaccgatt

SEQ ID NO: 267551 - DNA, 25 bp, Probe sequence
attatgtaccaaatcagcctttcag

SEQ ID NO: 267552 - DNA, 25 bp, Probe sequence
atttattatgtaccaaatcagcctt

SEQ ID NO: 267553 - DNA, 25 bp, Probe sequence
atttactatttattatgtaccaaat

SEQ ID NO: 267554 - DNA, 25 bp, Probe sequence
atacagtaatgcatcgttgttattt

SEQ ID NO: 267555 - DNA, 25 bp, Probe sequence
atgcatcgttgttattttttattta

SEQ ID NO: 267556 - DNA, 25 bp, Probe sequence
atgtaccaaatcagcctttcagtaa

SEQ ID NO: 267557 - DNA, 25 bp, Probe sequence
agtaatgcatcgttgttatttttta

SEQ ID NO: 267558 - DNA, 25 bp, Probe sequence
actatttattatgtaccaaatcagc

SEQ ID NO: 267559 - DNA, 25 bp, Probe sequence
acagtaatgcatcgttgttattttt

SEQ ID NO: 267560 - DNA, 25 bp, Probe sequence
aatgcatcgttgttattttttattt

SEQ ID NO: 267561 - DNA, 25 bp, Probe sequence
cagtaatgcatcgttgttatttttt

SEQ ID NO: 267562 - DNA, 25 bp, Probe sequence
catacagtaatgcatcgttgttatt

SEQ ID NO: 267563 - DNA, 25 bp, Probe sequence
ctatttattatgtaccaaatcagcc

SEQ ID NO: 267564 - DNA, 25 bp, Probe sequence
gcatcgttgttattttttatttatt

SEQ ID NO: 267565 - DNA, 25 bp, Probe sequence
gtaccaaatcagcctttcagtaaaa

SEQ ID NO: 267566 - DNA, 25 bp, Probe sequence
gtaatgcatcgttgttattttttat

SEQ ID NO: 267567 - DNA, 25 bp, Probe sequence
gtcagttattaatgcatacagtaat

SEQ ID NO: 267568 - DNA, 25 bp, Probe sequence
gtgtcagttattaatgcatacagta

SEQ ID NO: 267569 - DNA, 25 bp, Probe sequence
tgtaccaaatcagcctttcagtaaa

SEQ ID NO: 267570 - DNA, 25 bp, Probe sequence
tgtcagttattaatgcatacagtaa

SEQ ID NO: 267571 - DNA, 25 bp, Probe sequence
tgcatcgttgttattttttatttat

SEQ ID NO: 267572 - DNA, 25 bp, Probe sequence
taatgcatcgttgttattttttatt

SEQ ID NO: 267573 - DNA, 25 bp, Probe sequence
tacagtaatgcatcgttgttatttt

SEQ ID NO: 267574 - DNA, 25 bp, Probe sequence
tactatttattatgtaccaaatcag

SEQ ID NO: 267575 - DNA, 25 bp, Probe sequence
tatgtaccaaatcagcctttcagta

SEQ ID NO: 267576 - DNA, 25 bp, Probe sequence
tatttattatgtaccaaatcagcct

SEQ ID NO: 267577 - DNA, 25 bp, Probe sequence
tatttactatttattatgtaccaaa

SEQ ID NO: 267578 - DNA, 25 bp, Probe sequence
tattatgtaccaaatcagcctttca

SEQ ID NO: 267579 - DNA, 25 bp, Probe sequence
tttactatttattatgtaccaaatc

SEQ ID NO: 267580 - DNA, 25 bp, Probe sequence
tttatttactatttattatgtacca

SEQ ID NO: 267581 - DNA, 25 bp, Probe sequence
tttattatgtaccaaatcagccttt

SEQ ID NO: 267582 - DNA, 25 bp, Probe sequence
ttattatgtaccaaatcagcctttc

SEQ ID NO: 267583 - DNA, 25 bp, Probe sequence
ttatttactatttattatgtaccaa

SEQ ID NO: 267584 - DNA, 25 bp, Probe sequence
ttatgtaccaaatcagcctttcagt

SEQ ID NO: 267585 - DNA, 25 bp, Probe sequence
attagttggcggtttatacttcgca

SEQ ID NO: 267586 - DNA, 25 bp, Probe sequence
ataccaagaacgtgttaaccaagca

SEQ ID NO: 267587 - DNA, 25 bp, Probe sequence
agttggcggtttatacttcgcattt

SEQ ID NO: 267588 - DNA, 25 bp, Probe sequence
agcagttattttaacattagttggc

SEQ ID NO: 267589 - DNA, 25 bp, Probe sequence
acgtgttaaccaagcacctaacatt

SEQ ID NO: 267590 - DNA, 25 bp, Probe sequence
acattagttggcggtttatacttcg

SEQ ID NO: 267591 - DNA, 25 bp, Probe sequence
aacgtgttaaccaagcacctaacat

SEQ ID NO: 267592 - DNA, 25 bp, Probe sequence
caagaacgtgttaaccaagcaccta

SEQ ID NO: 267593 - DNA, 25 bp, Probe sequence
cagttattttaacattagttggcgg

SEQ ID NO: 267594 - DNA, 25 bp, Probe sequence
ccaagaacgtgttaaccaagcacct

SEQ ID NO: 267595 - DNA, 25 bp, Probe sequence
cattagttggcggtttatacttcgc

SEQ ID NO: 267596 - DNA, 25 bp, Probe sequence
cgtgttaaccaagcacctaacattg

SEQ ID NO: 267597 - DNA, 25 bp, Probe sequence
gcagttattttaacattagttggcg

SEQ ID NO: 267598 - DNA, 25 bp, Probe sequence
gaacgtgttaaccaagcacctaaca

SEQ ID NO: 267599 - DNA, 25 bp, Probe sequence
gttggcggtttatacttcgcattta

SEQ ID NO: 267600 - DNA, 25 bp, Probe sequence
gttaaccaagcacctaacattgagt

SEQ ID NO: 267601 - DNA, 25 bp, Probe sequence
gtgttaaccaagcacctaacattga

SEQ ID NO: 267602 - DNA, 25 bp, Probe sequence
tggcggtttatacttcgcatttaaa

SEQ ID NO: 267603 - DNA, 25 bp, Probe sequence
tgttaaccaagcacctaacattgag

SEQ ID NO: 267604 - DNA, 25 bp, Probe sequence
tcgcatttaaaaaataccaagaacg

SEQ ID NO: 267605 - DNA, 25 bp, Probe sequence
taccaagaacgtgttaaccaagcac

SEQ ID NO: 267606 - DNA, 25 bp, Probe sequence
taaccaagcacctaacattgagtac

SEQ ID NO: 267607 - DNA, 25 bp, Probe sequence
taacattagttggcggtttatactt

SEQ ID NO: 267608 - DNA, 25 bp, Probe sequence
tacttcgcatttaaaaaataccaag

SEQ ID NO: 267609 - DNA, 25 bp, Probe sequence
tagcagttattttaacattagttgg

SEQ ID NO: 267610 - DNA, 25 bp, Probe sequence
tagttggcggtttatacttcgcatt

SEQ ID NO: 267611 - DNA, 25 bp, Probe sequence
tatacttcgcatttaaaaaatacca

SEQ ID NO: 267612 - DNA, 25 bp, Probe sequence
ttaacattagttggcggtttatact

SEQ ID NO: 267613 - DNA, 25 bp, Probe sequence
ttagttggcggtttatacttcgcat

SEQ ID NO: 267614 - DNA, 25 bp, Probe sequence
ttaaccaagcacctaacattgagta

SEQ ID NO: 267615 - DNA, 25 bp, Probe sequence
ttggcggtttatacttcgcatttaa

SEQ ID NO: 267616 - DNA, 25 bp, Probe sequence
attgagcgcatttatttgactaatt

SEQ ID NO: 267617 - DNA, 25 bp, Probe sequence
agcgcatttatttgactaattcaaa

SEQ ID NO: 267618 - DNA, 25 bp, Probe sequence
accgacgattgagcgcatttatttg

SEQ ID NO: 267619 - DNA, 25 bp, Probe sequence
acgattgagcgcatttatttgacta

SEQ ID NO: 267620 - DNA, 25 bp, Probe sequence
acaccgacgattgagcgcatttatt

SEQ ID NO: 267621 - DNA, 25 bp, Probe sequence
cacaccgacgattgagcgcatttat

SEQ ID NO: 267622 - DNA, 25 bp, Probe sequence
caccgacgattgagcgcatttattt

SEQ ID NO: 267623 - DNA, 25 bp, Probe sequence
cgacgattgagcgcatttatttgac

SEQ ID NO: 267624 - DNA, 25 bp, Probe sequence
ctgtttgcacaccgacgattgagcg

SEQ ID NO: 267625 - DNA, 25 bp, Probe sequence
cgattgagcgcatttatttgactaa

SEQ ID NO: 267626 - DNA, 25 bp, Probe sequence
cgcatttatttgactaattcaaaaa

SEQ ID NO: 267627 - DNA, 25 bp, Probe sequence
ccgacgattgagcgcatttatttga

SEQ ID NO: 267628 - DNA, 25 bp, Probe sequence
gcgcatttatttgactaattcaaaa

SEQ ID NO: 267629 - DNA, 25 bp, Probe sequence
gcacaccgacgattgagcgcattta

SEQ ID NO: 267630 - DNA, 25 bp, Probe sequence
gactaattcaaaaaacattgttgtt

SEQ ID NO: 267631 - DNA, 25 bp, Probe sequence
gacgattgagcgcatttatttgact

SEQ ID NO: 267632 - DNA, 25 bp, Probe sequence
gagcgcatttatttgactaattcaa

SEQ ID NO: 267633 - DNA, 25 bp, Probe sequence
gattgagcgcatttatttgactaat

SEQ ID NO: 267634 - DNA, 25 bp, Probe sequence
gtttgcacaccgacgattgagcgca

SEQ ID NO: 267635 - DNA, 25 bp, Probe sequence
gtctgtttgcacaccgacgattgag

SEQ ID NO: 267636 - DNA, 25 bp, Probe sequence
tgtttgcacaccgacgattgagcgc

SEQ ID NO: 267637 - DNA, 25 bp, Probe sequence
tgtctgtttgcacaccgacgattga

SEQ ID NO: 267638 - DNA, 25 bp, Probe sequence
tgagcgcatttatttgactaattca

SEQ ID NO: 267639 - DNA, 25 bp, Probe sequence
tgactaattcaaaaaacattgttgt

SEQ ID NO: 267640 - DNA, 25 bp, Probe sequence
tgcacaccgacgattgagcgcattt

SEQ ID NO: 267641 - DNA, 25 bp, Probe sequence
tctgtttgcacaccgacgattgagc

SEQ ID NO: 267642 - DNA, 25 bp, Probe sequence
tttgcacaccgacgattgagcgcat

SEQ ID NO: 267643 - DNA, 25 bp, Probe sequence
tcaaaaaacattgttgttttcctag

SEQ ID NO: 267644 - DNA, 25 bp, Probe sequence
ttgtctgtttgcacaccgacgattg

SEQ ID NO: 267645 - DNA, 25 bp, Probe sequence
ttgcacaccgacgattgagcgcatt

SEQ ID NO: 267646 - DNA, 25 bp, Probe sequence
ttgactaattcaaaaaacattgttg

SEQ ID NO: 267647 - DNA, 25 bp, Probe sequence
ttgagcgcatttatttgactaattc

SEQ ID NO: 267648 - DNA, 25 bp, Probe sequence
atcatttctaaaccaagtgttgtaa

SEQ ID NO: 267649 - DNA, 25 bp, Probe sequence
atcgacacgggatatattaaagtca

SEQ ID NO: 267650 - DNA, 25 bp, Probe sequence
atgagtacaagtgcaatcgacacgg

SEQ ID NO: 267651 - DNA, 25 bp, Probe sequence
atgatagagaaaataagtgcgaata

SEQ ID NO: 267652 - DNA, 25 bp, Probe sequence
agtgcaatcgacacgggatatatta

SEQ ID NO: 267653 - DNA, 25 bp, Probe sequence
agtacaagtgcaatcgacacgggat

SEQ ID NO: 267654 - DNA, 25 bp, Probe sequence
acaagtgcaatcgacacgggatata

SEQ ID NO: 267655 - DNA, 25 bp, Probe sequence
aaatcatttctaaaccaagtgttgt

SEQ ID NO: 267656 - DNA, 25 bp, Probe sequence
aaaatcatttctaaaccaagtgttg

SEQ ID NO: 267657 - DNA, 25 bp, Probe sequence
aagtcaataatgggacagcaatttt

SEQ ID NO: 267658 - DNA, 25 bp, Probe sequence
aagtgttgtaaataagaaccctatg

SEQ ID NO: 267659 - DNA, 25 bp, Probe sequence
aagtgcaatcgacacgggatatatt

SEQ ID NO: 267660 - DNA, 25 bp, Probe sequence
aatgggacagcaatttttaaaatca

SEQ ID NO: 267661 - DNA, 25 bp, Probe sequence
aatcatttctaaaccaagtgttgta

SEQ ID NO: 267662 - DNA, 25 bp, Probe sequence
caagtgcaatcgacacgggatatat

SEQ ID NO: 267663 - DNA, 25 bp, Probe sequence
catttctaaaccaagtgttgtaaat

SEQ ID NO: 267664 - DNA, 25 bp, Probe sequence
ctgaatctgaatgtgctaaacatgt

SEQ ID NO: 267665 - DNA, 25 bp, Probe sequence
gcaatcgacacgggatatattaaag

SEQ ID NO: 267666 - DNA, 25 bp, Probe sequence
gaatctgaatgtgctaaacatgtta

SEQ ID NO: 267667 - DNA, 25 bp, Probe sequence
gaatgtgctaaacatgttagcaaat

SEQ ID NO: 267668 - DNA, 25 bp, Probe sequence
gacacgggatatattaaagtcaata

SEQ ID NO: 267669 - DNA, 25 bp, Probe sequence
gagtacaagtgcaatcgacacggga

SEQ ID NO: 267670 - DNA, 25 bp, Probe sequence
gatatgagtacaagtgcaatcgaca

SEQ ID NO: 267671 - DNA, 25 bp, Probe sequence
gttagcaaatgatatgagtacaagt

SEQ ID NO: 267672 - DNA, 25 bp, Probe sequence
gtacaagtgcaatcgacacgggata

SEQ ID NO: 267673 - DNA, 25 bp, Probe sequence
gtaaataagaaccctatgatagaga

SEQ ID NO: 267674 - DNA, 25 bp, Probe sequence
gtcaataatgggacagcaattttta

SEQ ID NO: 267675 - DNA, 25 bp, Probe sequence
gtgcaatcgacacgggatatattaa

SEQ ID NO: 267676 - DNA, 25 bp, Probe sequence
gtgttgtaaataagaaccctatgat

SEQ ID NO: 267677 - DNA, 25 bp, Probe sequence
ggacagcaatttttaaaatcatttc

SEQ ID NO: 267678 - DNA, 25 bp, Probe sequence
tgagtacaagtgcaatcgacacggg

SEQ ID NO: 267679 - DNA, 25 bp, Probe sequence
taaaatcatttctaaaccaagtgtt

SEQ ID NO: 267680 - DNA, 25 bp, Probe sequence
tacaagtgcaatcgacacgggatat

SEQ ID NO: 267681 - DNA, 25 bp, Probe sequence
tatgagtacaagtgcaatcgacacg

SEQ ID NO: 267682 - DNA, 25 bp, Probe sequence
attatcgtaatgggggtcaatggtt

SEQ ID NO: 267683 - DNA, 25 bp, Probe sequence
atcgtaatgggggtcaatggttatg

SEQ ID NO: 267684 - DNA, 25 bp, Probe sequence
atgggggtcaatggttatggattta

SEQ ID NO: 267685 - DNA, 25 bp, Probe sequence
atggttatggatttattgataggta

SEQ ID NO: 267686 - DNA, 25 bp, Probe sequence
aaattatcgtaatgggggtcaatgg

SEQ ID NO: 267687 - DNA, 25 bp, Probe sequence
aaaattatcgtaatgggggtcaatg

SEQ ID NO: 267688 - DNA, 25 bp, Probe sequence
aatgggggtcaatggttatggattt

SEQ ID NO: 267689 - DNA, 25 bp, Probe sequence
aatggttatggatttattgataggt

SEQ ID NO: 267690 - DNA, 25 bp, Probe sequence
aattatcgtaatgggggtcaatggt

SEQ ID NO: 267691 - DNA, 25 bp, Probe sequence
cgtaatgggggtcaatggttatgga

SEQ ID NO: 267692 - DNA, 25 bp, Probe sequence
gttatggatttattgataggtactt

SEQ ID NO: 267693 - DNA, 25 bp, Probe sequence
gtaatgggggtcaatggttatggat

SEQ ID NO: 267694 - DNA, 25 bp, Probe sequence
gtcaatggttatggatttattgata

SEQ ID NO: 267695 - DNA, 25 bp, Probe sequence
gggtcaatggttatggatttattga

SEQ ID NO: 267696 - DNA, 25 bp, Probe sequence
gggggtcaatggttatggatttatt

SEQ ID NO: 267697 - DNA, 25 bp, Probe sequence
ggggtcaatggttatggatttattg

SEQ ID NO: 267698 - DNA, 25 bp, Probe sequence
ggtcaatggttatggatttattgat

SEQ ID NO: 267699 - DNA, 25 bp, Probe sequence
ggttatggatttattgataggtact

SEQ ID NO: 267700 - DNA, 25 bp, Probe sequence
ggatttattgataggtactttattt

SEQ ID NO: 267701 - DNA, 25 bp, Probe sequence
tcgtaatgggggtcaatggttatgg

SEQ ID NO: 267702 - DNA, 25 bp, Probe sequence
tggttatggatttattgataggtac

SEQ ID NO: 267703 - DNA, 25 bp, Probe sequence
tgggggtcaatggttatggatttat

SEQ ID NO: 267704 - DNA, 25 bp, Probe sequence
taatgggggtcaatggttatggatt

SEQ ID NO: 267705 - DNA, 25 bp, Probe sequence
taaaattatcgtaatgggggtcaat

SEQ ID NO: 267706 - DNA, 25 bp, Probe sequence
tataaaattatcgtaatgggggtca

SEQ ID NO: 267707 - DNA, 25 bp, Probe sequence
tatcgtaatgggggtcaatggttat

SEQ ID NO: 267708 - DNA, 25 bp, Probe sequence
ttatcgtaatgggggtcaatggtta

SEQ ID NO: 267709 - DNA, 25 bp, Probe sequence
ttatggatttattgataggtacttt

SEQ ID NO: 267710 - DNA, 25 bp, Probe sequence
attgattaaccataaaagagaaatt

SEQ ID NO: 267711 - DNA, 25 bp, Probe sequence
atttcggcataaacgtcattaaaga

SEQ ID NO: 267712 - DNA, 25 bp, Probe sequence
atattgattaaccataaaagagaaa

SEQ ID NO: 267713 - DNA, 25 bp, Probe sequence
atgtaaaaacatattgattaaccat

SEQ ID NO: 267714 - DNA, 25 bp, Probe sequence
aggttgtcgaatgtaaaaacatatt

SEQ ID NO: 267715 - DNA, 25 bp, Probe sequence
agatttcggcataaacgtcattaaa

SEQ ID NO: 267716 - DNA, 25 bp, Probe sequence
agagaaattatttttgtagatttcg

SEQ ID NO: 267717 - DNA, 25 bp, Probe sequence
acatattgattaaccataaaagaga

SEQ ID NO: 267718 - DNA, 25 bp, Probe sequence
aaacatattgattaaccataaaaga

SEQ ID NO: 267719 - DNA, 25 bp, Probe sequence
aaaacatattgattaaccataaaag

SEQ ID NO: 267720 - DNA, 25 bp, Probe sequence
aacatattgattaaccataaaagag

SEQ ID NO: 267721 - DNA, 25 bp, Probe sequence
aaggttgtcgaatgtaaaaacatat

SEQ ID NO: 267722 - DNA, 25 bp, Probe sequence
aatgtaaaaacatattgattaacca

SEQ ID NO: 267723 - DNA, 25 bp, Probe sequence
catattgattaaccataaaagagaa

SEQ ID NO: 267724 - DNA, 25 bp, Probe sequence
gatttcggcataaacgtcattaaag

SEQ ID NO: 267725 - DNA, 25 bp, Probe sequence
gttgtcgaatgtaaaaacatattga

SEQ ID NO: 267726 - DNA, 25 bp, Probe sequence
gtagatttcggcataaacgtcatta

SEQ ID NO: 267727 - DNA, 25 bp, Probe sequence
gtaaaaacatattgattaaccataa

SEQ ID NO: 267728 - DNA, 25 bp, Probe sequence
ggttgtcgaatgtaaaaacatattg

SEQ ID NO: 267729 - DNA, 25 bp, Probe sequence
tgtaaaaacatattgattaaccata

SEQ ID NO: 267730 - DNA, 25 bp, Probe sequence
tagatttcggcataaacgtcattaa

SEQ ID NO: 267731 - DNA, 25 bp, Probe sequence
taaggttgtcgaatgtaaaaacata

SEQ ID NO: 267732 - DNA, 25 bp, Probe sequence
taaaaacatattgattaaccataaa

SEQ ID NO: 267733 - DNA, 25 bp, Probe sequence
tttcggcataaacgtcattaaagaa

SEQ ID NO: 267734 - DNA, 25 bp, Probe sequence
ttaaggttgtcgaatgtaaaaacat

SEQ ID NO: 267735 - DNA, 25 bp, Probe sequence
attatgttagccacgcttcaaataa

SEQ ID NO: 267736 - DNA, 25 bp, Probe sequence
attatattatgttagccacgcttca

SEQ ID NO: 267737 - DNA, 25 bp, Probe sequence
atattatgttagccacgcttcaaat

SEQ ID NO: 267738 - DNA, 25 bp, Probe sequence
atcgaggagctatcttagagcaggg

SEQ ID NO: 267739 - DNA, 25 bp, Probe sequence
atgttagccacgcttcaaataaaaa

SEQ ID NO: 267740 - DNA, 25 bp, Probe sequence
aggagctatcttagagcagggaaat

SEQ ID NO: 267741 - DNA, 25 bp, Probe sequence
agagcagggaaataaaacagccaaa

SEQ ID NO: 267742 - DNA, 25 bp, Probe sequence
agcagggaaataaaacagccaaagt

SEQ ID NO: 267743 - DNA, 25 bp, Probe sequence
agctatcttagagcagggaaataaa

SEQ ID NO: 267744 - DNA, 25 bp, Probe sequence
acagccaaagttataaaaagtgaat

SEQ ID NO: 267745 - DNA, 25 bp, Probe sequence
aatcgaggagctatcttagagcagg

SEQ ID NO: 267746 - DNA, 25 bp, Probe sequence
aattatattatgttagccacgcttc

SEQ ID NO: 267747 - DNA, 25 bp, Probe sequence
cagccaaagttataaaaagtgaatt

SEQ ID NO: 267748 - DNA, 25 bp, Probe sequence
ctatcttagagcagggaaataaaac

SEQ ID NO: 267749 - DNA, 25 bp, Probe sequence
cgaggagctatcttagagcagggaa

SEQ ID NO: 267750 - DNA, 25 bp, Probe sequence
tcgaggagctatcttagagcaggga

SEQ ID NO: 267751 - DNA, 25 bp, Probe sequence
gcagggaaataaaacagccaaagtt

SEQ ID NO: 267752 - DNA, 25 bp, Probe sequence
gctatcttagagcagggaaataaaa

SEQ ID NO: 267753 - DNA, 25 bp, Probe sequence
gagctatcttagagcagggaaataa

SEQ ID NO: 267754 - DNA, 25 bp, Probe sequence
gagcagggaaataaaacagccaaag

SEQ ID NO: 267755 - DNA, 25 bp, Probe sequence
gaggagctatcttagagcagggaaa

SEQ ID NO: 267756 - DNA, 25 bp, Probe sequence
gttagccacgcttcaaataaaaaat

SEQ ID NO: 267757 - DNA, 25 bp, Probe sequence
ggagctatcttagagcagggaaata

SEQ ID NO: 267758 - DNA, 25 bp, Probe sequence
tgttagccacgcttcaaataaaaaa

SEQ ID NO: 267759 - DNA, 25 bp, Probe sequence
taattatattatgttagccacgctt

SEQ ID NO: 267760 - DNA, 25 bp, Probe sequence
tagccacgcttcaaataaaaaataa

SEQ ID NO: 267761 - DNA, 25 bp, Probe sequence
tagagcagggaaataaaacagccaa

SEQ ID NO: 267762 - DNA, 25 bp, Probe sequence
tatgttagccacgcttcaaataaaa

SEQ ID NO: 267763 - DNA, 25 bp, Probe sequence
tatattatgttagccacgcttcaaa

SEQ ID NO: 267764 - DNA, 25 bp, Probe sequence
tattatgttagccacgcttcaaata

SEQ ID NO: 267765 - DNA, 25 bp, Probe sequence
ttatattatgttagccacgcttcaa

SEQ ID NO: 267766 - DNA, 25 bp, Probe sequence
ttatgttagccacgcttcaaataaa

SEQ ID NO: 267767 - DNA, 25 bp, Probe sequence
ttagagcagggaaataaaacagcca

SEQ ID NO: 267768 - DNA, 25 bp, Probe sequence
ttagccacgcttcaaataaaaaata

SEQ ID NO: 267769 - DNA, 25 bp, Probe sequence
atagtgttactgagacgcattacga

SEQ ID NO: 267770 - DNA, 25 bp, Probe sequence
agtgttactgagacgcattacgaag

SEQ ID NO: 267771 - DNA, 25 bp, Probe sequence
agacgcattacgaagaaatttatct

SEQ ID NO: 267772 - DNA, 25 bp, Probe sequence
acgcattacgaagaaatttatcttg

SEQ ID NO: 267773 - DNA, 25 bp, Probe sequence
actgagacgcattacgaagaaattt

SEQ ID NO: 267774 - DNA, 25 bp, Probe sequence
aatagtgttactgagacgcattacg

SEQ ID NO: 267775 - DNA, 25 bp, Probe sequence
cattacgaagaaatttatcttgttt

SEQ ID NO: 267776 - DNA, 25 bp, Probe sequence
cttggtaatagtgttactgagacgc

SEQ ID NO: 267777 - DNA, 25 bp, Probe sequence
cgcattacgaagaaatttatcttgt

SEQ ID NO: 267778 - DNA, 25 bp, Probe sequence
ctgagacgcattacgaagaaattta

SEQ ID NO: 267779 - DNA, 25 bp, Probe sequence
gcattacgaagaaatttatcttgtt

SEQ ID NO: 267780 - DNA, 25 bp, Probe sequence
gacgcattacgaagaaatttatctt

SEQ ID NO: 267781 - DNA, 25 bp, Probe sequence
gagacgcattacgaagaaatttatc

SEQ ID NO: 267782 - DNA, 25 bp, Probe sequence
gttactgagacgcattacgaagaaa

SEQ ID NO: 267783 - DNA, 25 bp, Probe sequence
gtaatagtgttactgagacgcatta

SEQ ID NO: 267784 - DNA, 25 bp, Probe sequence
gtgttactgagacgcattacgaaga

SEQ ID NO: 267785 - DNA, 25 bp, Probe sequence
ggtaatagtgttactgagacgcatt

SEQ ID NO: 267786 - DNA, 25 bp, Probe sequence
tggtaatagtgttactgagacgcat

SEQ ID NO: 267787 - DNA, 25 bp, Probe sequence
tgttactgagacgcattacgaagaa

SEQ ID NO: 267788 - DNA, 25 bp, Probe sequence
tgagacgcattacgaagaaatttat

SEQ ID NO: 267789 - DNA, 25 bp, Probe sequence
tcttggtaatagtgttactgagacg

SEQ ID NO: 267790 - DNA, 25 bp, Probe sequence
taatagtgttactgagacgcattac

SEQ ID NO: 267791 - DNA, 25 bp, Probe sequence
tactgagacgcattacgaagaaatt

SEQ ID NO: 267792 - DNA, 25 bp, Probe sequence
tagtgttactgagacgcattacgaa

SEQ ID NO: 267793 - DNA, 25 bp, Probe sequence
ttactgagacgcattacgaagaaat

SEQ ID NO: 267794 - DNA, 25 bp, Probe sequence
ttcttggtaatagtgttactgagac

SEQ ID NO: 267795 - DNA, 25 bp, Probe sequence
ttggtaatagtgttactgagacgca

SEQ ID NO: 267796 - DNA, 25 bp, Probe sequence
atttgcaaagggcgaaatgggttct

SEQ ID NO: 267797 - DNA, 25 bp, Probe sequence
attaagaaaatcattcatttgcaaa

SEQ ID NO: 267798 - DNA, 25 bp, Probe sequence
atcattcatttgcaaagggcgaaat

SEQ ID NO: 267799 - DNA, 25 bp, Probe sequence
atgggttcttactgagttatctatt

SEQ ID NO: 267800 - DNA, 25 bp, Probe sequence
agggcgaaatgggttcttactgagt

SEQ ID NO: 267801 - DNA, 25 bp, Probe sequence
agaaaatcattcatttgcaaagggc

SEQ ID NO: 267802 - DNA, 25 bp, Probe sequence
aaatcattcatttgcaaagggcgaa

SEQ ID NO: 267803 - DNA, 25 bp, Probe sequence
aaatgggttcttactgagttatcta

SEQ ID NO: 267804 - DNA, 25 bp, Probe sequence
caaagggcgaaatgggttcttactg

SEQ ID NO: 267805 - DNA, 25 bp, Probe sequence
aaaatcattcatttgcaaagggcga

SEQ ID NO: 267806 - DNA, 25 bp, Probe sequence
aagaaaatcattcatttgcaaaggg

SEQ ID NO: 267807 - DNA, 25 bp, Probe sequence
aagggcgaaatgggttcttactgag

SEQ ID NO: 267808 - DNA, 25 bp, Probe sequence
aatgggttcttactgagttatctat

SEQ ID NO: 267809 - DNA, 25 bp, Probe sequence
aatcattcatttgcaaagggcgaaa

SEQ ID NO: 267810 - DNA, 25 bp, Probe sequence
cattcatttgcaaagggcgaaatgg

SEQ ID NO: 267811 - DNA, 25 bp, Probe sequence
cttactgagttatctattataaaaa

SEQ ID NO: 267812 - DNA, 25 bp, Probe sequence
cgaaatgggttcttactgagttatc

SEQ ID NO: 267813 - DNA, 25 bp, Probe sequence
gcgaaatgggttcttactgagttat

SEQ ID NO: 267814 - DNA, 25 bp, Probe sequence
gcaaagggcgaaatgggttcttact

SEQ ID NO: 267815 - DNA, 25 bp, Probe sequence
gaaaatcattcatttgcaaagggcg

SEQ ID NO: 267816 - DNA, 25 bp, Probe sequence
gaaatgggttcttactgagttatct

SEQ ID NO: 267817 - DNA, 25 bp, Probe sequence
gttcttactgagttatctattataa

SEQ ID NO: 267818 - DNA, 25 bp, Probe sequence
gggcgaaatgggttcttactgagtt

SEQ ID NO: 267819 - DNA, 25 bp, Probe sequence
gggttcttactgagttatctattat

SEQ ID NO: 267820 - DNA, 25 bp, Probe sequence
ggttcttactgagttatctattata

SEQ ID NO: 267821 - DNA, 25 bp, Probe sequence
ggcgaaatgggttcttactgagtta

SEQ ID NO: 267822 - DNA, 25 bp, Probe sequence
tgggttcttactgagttatctatta

SEQ ID NO: 267823 - DNA, 25 bp, Probe sequence
tgcaaagggcgaaatgggttcttac

SEQ ID NO: 267824 - DNA, 25 bp, Probe sequence
tcttactgagttatctattataaaa

SEQ ID NO: 267825 - DNA, 25 bp, Probe sequence
tcattcatttgcaaagggcgaaatg

SEQ ID NO: 267826 - DNA, 25 bp, Probe sequence
taagaaaatcattcatttgcaaagg

SEQ ID NO: 267827 - DNA, 25 bp, Probe sequence
tttgcaaagggcgaaatgggttctt

SEQ ID NO: 267828 - DNA, 25 bp, Probe sequence
ttgcaaagggcgaaatgggttctta

SEQ ID NO: 267829 - DNA, 25 bp, Probe sequence
ttcttactgagttatctattataaa

SEQ ID NO: 267830 - DNA, 25 bp, Probe sequence
attttactagaatggcatttaagaa

SEQ ID NO: 267831 - DNA, 25 bp, Probe sequence
atagcgctaaaataacagtgttaag

SEQ ID NO: 267832 - DNA, 25 bp, Probe sequence
atggcatttaagaatatttatacgt

SEQ ID NO: 267833 - DNA, 25 bp, Probe sequence
agaatggcatttaagaatatttata

SEQ ID NO: 267834 - DNA, 25 bp, Probe sequence
agcgctaaaataacagtgttaagtt

SEQ ID NO: 267835 - DNA, 25 bp, Probe sequence
accttaatagcgctaaaataacagt

SEQ ID NO: 267836 - DNA, 25 bp, Probe sequence
acaaattttactagaatggcattta

SEQ ID NO: 267837 - DNA, 25 bp, Probe sequence
aaattttactagaatggcatttaag

SEQ ID NO: 267838 - DNA, 25 bp, Probe sequence
aacaaattttactagaatggcattt

SEQ ID NO: 267839 - DNA, 25 bp, Probe sequence
aaccttaatagcgctaaaataacag

SEQ ID NO: 267840 - DNA, 25 bp, Probe sequence
aatggcatttaagaatatttatacg

SEQ ID NO: 267841 - DNA, 25 bp, Probe sequence
aatagcgctaaaataacagtgttaa

SEQ ID NO: 267842 - DNA, 25 bp, Probe sequence
aattttactagaatggcatttaaga

SEQ ID NO: 267843 - DNA, 25 bp, Probe sequence
caaattttactagaatggcatttaa

SEQ ID NO: 267844 - DNA, 25 bp, Probe sequence
cttaatagcgctaaaataacagtgt

SEQ ID NO: 267845 - DNA, 25 bp, Probe sequence
ctagaatggcatttaagaatattta

SEQ ID NO: 267846 - DNA, 25 bp, Probe sequence
ccttaatagcgctaaaataacagtg

SEQ ID NO: 267847 - DNA, 25 bp, Probe sequence
gcatttaagaatatttatacgttat

SEQ ID NO: 267848 - DNA, 25 bp, Probe sequence
gaatatttatacgttattaacgaat

SEQ ID NO: 267849 - DNA, 25 bp, Probe sequence
gaatggcatttaagaatatttatac

SEQ ID NO: 267850 - DNA, 25 bp, Probe sequence
ggcatttaagaatatttatacgtta

SEQ ID NO: 267851 - DNA, 25 bp, Probe sequence
tggcatttaagaatatttatacgtt

SEQ ID NO: 267852 - DNA, 25 bp, Probe sequence
tgaatatttatataatttttcccgt

SEQ ID NO: 267853 - DNA, 25 bp, Probe sequence
taataaacaaaaccttaatagcgct

SEQ ID NO: 267854 - DNA, 25 bp, Probe sequence
taatagcgctaaaataacagtgtta

SEQ ID NO: 267855 - DNA, 25 bp, Probe sequence
taagaatatttatacgttattaacg

SEQ ID NO: 267856 - DNA, 25 bp, Probe sequence
taacaaattttactagaatggcatt

SEQ ID NO: 267857 - DNA, 25 bp, Probe sequence
tagcgctaaaataacagtgttaagt

SEQ ID NO: 267858 - DNA, 25 bp, Probe sequence
tagaatggcatttaagaatatttat

SEQ ID NO: 267859 - DNA, 25 bp, Probe sequence
tttaacaaattttactagaatggca

SEQ ID NO: 267860 - DNA, 25 bp, Probe sequence
tttactagaatggcatttaagaata

SEQ ID NO: 267861 - DNA, 25 bp, Probe sequence
ttttactagaatggcatttaagaat

SEQ ID NO: 267862 - DNA, 25 bp, Probe sequence
ttaacaaattttactagaatggcat

SEQ ID NO: 267863 - DNA, 25 bp, Probe sequence
ttaatagcgctaaaataacagtgtt

SEQ ID NO: 267864 - DNA, 25 bp, Probe sequence
attgatcggttagttcaccattcaa

SEQ ID NO: 267865 - DNA, 25 bp, Probe sequence
attacgactaatattccattttcga

SEQ ID NO: 267866 - DNA, 25 bp, Probe sequence
attactggagaatcatatcgattaa

SEQ ID NO: 267867 - DNA, 25 bp, Probe sequence
ataagattgtatcagcagctataat

SEQ ID NO: 267868 - DNA, 25 bp, Probe sequence
ataattgatcggttagttcaccatt

SEQ ID NO: 267869 - DNA, 25 bp, Probe sequence
atcggttagttcaccattcaaaagt

SEQ ID NO: 267870 - DNA, 25 bp, Probe sequence
atgtcactaaggtatgaatggaaat

SEQ ID NO: 267871 - DNA, 25 bp, Probe sequence
agattgtatcagcagctataattga

SEQ ID NO: 267872 - DNA, 25 bp, Probe sequence
acgactaatattccattttcgagtt

SEQ ID NO: 267873 - DNA, 25 bp, Probe sequence
aaattactggagaatcatatcgatt

SEQ ID NO: 267874 - DNA, 25 bp, Probe sequence
aatattccattttcgagttggggag

SEQ ID NO: 267875 - DNA, 25 bp, Probe sequence
aattgatcggttagttcaccattca

SEQ ID NO: 267876 - DNA, 25 bp, Probe sequence
cattttcgagttggggagagtcatt

SEQ ID NO: 267877 - DNA, 25 bp, Probe sequence
ctaatattccattttcgagttgggg

SEQ ID NO: 267878 - DNA, 25 bp, Probe sequence
gctataattgatcggttagttcacc

SEQ ID NO: 267879 - DNA, 25 bp, Probe sequence
gcagctataattgatcggttagttc

SEQ ID NO: 267880 - DNA, 25 bp, Probe sequence
gactaatattccattttcgagttgg

SEQ ID NO: 267881 - DNA, 25 bp, Probe sequence
gagttggggagagtcatttagtaat

SEQ ID NO: 267882 - DNA, 25 bp, Probe sequence
gatcggttagttcaccattcaaaag

SEQ ID NO: 267883 - DNA, 25 bp, Probe sequence
gttggggagagtcatttagtaataa

SEQ ID NO: 267884 - DNA, 25 bp, Probe sequence
gttagttcaccattcaaaagtattt

SEQ ID NO: 267885 - DNA, 25 bp, Probe sequence
gtatcagcagctataattgatcggt

SEQ ID NO: 267886 - DNA, 25 bp, Probe sequence
gtaataagattgtatcagcagctat

SEQ ID NO: 267887 - DNA, 25 bp, Probe sequence
ggggagagtcatttagtaataagat

SEQ ID NO: 267888 - DNA, 25 bp, Probe sequence
ggttagttcaccattcaaaagtatt

SEQ ID NO: 267889 - DNA, 25 bp, Probe sequence
ttccattttcgagttggggagagtc

SEQ ID NO: 267890 - DNA, 25 bp, Probe sequence
ggaaatcaacaataattacgactaa

SEQ ID NO: 267891 - DNA, 25 bp, Probe sequence
tgatcggttagttcaccattcaaaa

SEQ ID NO: 267892 - DNA, 25 bp, Probe sequence
tcagcagctataattgatcggttag

SEQ ID NO: 267893 - DNA, 25 bp, Probe sequence
tacgactaatattccattttcgagt

SEQ ID NO: 267894 - DNA, 25 bp, Probe sequence
tattccattttcgagttggggagag

SEQ ID NO: 267895 - DNA, 25 bp, Probe sequence
ttttcgagttggggagagtcattta

SEQ ID NO: 267896 - DNA, 25 bp, Probe sequence
ttcgagttggggagagtcatttagt

SEQ ID NO: 267897 - DNA, 25 bp, Probe sequence
ttgatcggttagttcaccattcaaa

SEQ ID NO: 267898 - DNA, 25 bp, Probe sequence
attagtggaatgataccggttgagt

SEQ ID NO: 267899 - DNA, 25 bp, Probe sequence
atttgatcaattgagtcttgaaaat

SEQ ID NO: 267900 - DNA, 25 bp, Probe sequence
atgaagctgaacaatagaggcgata

SEQ ID NO: 267901 - DNA, 25 bp, Probe sequence
atgatatttttatggatttatggat

SEQ ID NO: 267902 - DNA, 25 bp, Probe sequence
atgtctcaaatgatatttttatgga

SEQ ID NO: 267903 - DNA, 25 bp, Probe sequence
agtggaatgataccggttgagtggg

SEQ ID NO: 267904 - DNA, 25 bp, Probe sequence
agattagtggaatgataccggttga

SEQ ID NO: 267905 - DNA, 25 bp, Probe sequence
agaatttgatcaattgagtcttgaa

SEQ ID NO: 267906 - DNA, 25 bp, Probe sequence
agctgaacaatagaggcgataacat

SEQ ID NO: 267907 - DNA, 25 bp, Probe sequence
aacctggaagtgaagaattgaatta

SEQ ID NO: 267908 - DNA, 25 bp, Probe sequence
aagctgaacaatagaggcgataaca

SEQ ID NO: 267909 - DNA, 25 bp, Probe sequence
aattgagtcttgaaaattattatat

SEQ ID NO: 267910 - DNA, 25 bp, Probe sequence
ctaaacctggaagtgaagaattgaa

SEQ ID NO: 267911 - DNA, 25 bp, Probe sequence
gctgaacaatagaggcgataacatg

SEQ ID NO: 267912 - DNA, 25 bp, Probe sequence
gaatttgatcaattgagtcttgaaa

SEQ ID NO: 267913 - DNA, 25 bp, Probe sequence
gaatgataccggttgagtgggaaaa

SEQ ID NO: 267914 - DNA, 25 bp, Probe sequence
gaagctgaacaatagaggcgataac

SEQ ID NO: 267915 - DNA, 25 bp, Probe sequence
gaacaatagaggcgataacatgact

SEQ ID NO: 267916 - DNA, 25 bp, Probe sequence
gagattagtggaatgataccggttg

SEQ ID NO: 267917 - DNA, 25 bp, Probe sequence
gatggtaaattgaaagtatcttttg

SEQ ID NO: 267918 - DNA, 25 bp, Probe sequence
gatcaattgagtcttgaaaattatt

SEQ ID NO: 267919 - DNA, 25 bp, Probe sequence
gattagtggaatgataccggttgag

SEQ ID NO: 267920 - DNA, 25 bp, Probe sequence
gatatttttatggatttatggatga

SEQ ID NO: 267921 - DNA, 25 bp, Probe sequence
gtctcaaatgatatttttatggatt

SEQ ID NO: 267922 - DNA, 25 bp, Probe sequence
gtggaatgataccggttgagtggga

SEQ ID NO: 267923 - DNA, 25 bp, Probe sequence
ggaatgataccggttgagtgggaaa

SEQ ID NO: 267924 - DNA, 25 bp, Probe sequence
tggaatgataccggttgagtgggaa

SEQ ID NO: 267925 - DNA, 25 bp, Probe sequence
tgaacaatagaggcgataacatgac

SEQ ID NO: 267926 - DNA, 25 bp, Probe sequence
tacaaaaaattcgaggttataccag

SEQ ID NO: 267927 - DNA, 25 bp, Probe sequence
tagtggaatgataccggttgagtgg

SEQ ID NO: 267928 - DNA, 25 bp, Probe sequence
tatggatttatggatgaaagtttat

SEQ ID NO: 267929 - DNA, 25 bp, Probe sequence
tatactaaacctggaagtgaagaat

SEQ ID NO: 267930 - DNA, 25 bp, Probe sequence
ttagtggaatgataccggttgagtg

SEQ ID NO: 267931 - DNA, 25 bp, Probe sequence
tatagattggttaaatacagaattt

SEQ ID NO: 267932 - DNA, 25 bp, Probe sequence
attgttcgagtataaagggaactat

SEQ ID NO: 267933 - DNA, 25 bp, Probe sequence
attttatcatattgttcgagtataa

SEQ ID NO: 267934 - DNA, 25 bp, Probe sequence
atagcgaaaaagttgagcatcggca

SEQ ID NO: 267935 - DNA, 25 bp, Probe sequence
atcatattgttcgagtataaaggga

SEQ ID NO: 267936 - DNA, 25 bp, Probe sequence
atcggcaattttatcatattgttcg

SEQ ID NO: 267937 - DNA, 25 bp, Probe sequence
agttgagcatcggcaattttatcat

SEQ ID NO: 267938 - DNA, 25 bp, Probe sequence
agcatcggcaattttatcatattgt

SEQ ID NO: 267939 - DNA, 25 bp, Probe sequence
agcgaaaaagttgagcatcggcaat

SEQ ID NO: 267940 - DNA, 25 bp, Probe sequence
aaatgtaatgaaggttgcgccaaaa

SEQ ID NO: 267941 - DNA, 25 bp, Probe sequence
aaagttgagcatcggcaattttatc

SEQ ID NO: 267942 - DNA, 25 bp, Probe sequence
aaaaagttgagcatcggcaatttta

SEQ ID NO: 267943 - DNA, 25 bp, Probe sequence
aaaagttgagcatcggcaattttat

SEQ ID NO: 267944 - DNA, 25 bp, Probe sequence
aagttgagcatcggcaattttatca

SEQ ID NO: 267945 - DNA, 25 bp, Probe sequence
aattttatcatattgttcgagtata

SEQ ID NO: 267946 - DNA, 25 bp, Probe sequence
caattttatcatattgttcgagtat

SEQ ID NO: 267947 - DNA, 25 bp, Probe sequence
catcggcaattttatcatattgttc

SEQ ID NO: 267948 - DNA, 25 bp, Probe sequence
cggcaattttatcatattgttcgag

SEQ ID NO: 267949 - DNA, 25 bp, Probe sequence
cgaaaaagttgagcatcggcaattt

SEQ ID NO: 267950 - DNA, 25 bp, Probe sequence
gcgaaaaagttgagcatcggcaatt

SEQ ID NO: 267951 - DNA, 25 bp, Probe sequence
gcatcggcaattttatcatattgtt

SEQ ID NO: 267952 - DNA, 25 bp, Probe sequence
gcaattttatcatattgttcgagta

SEQ ID NO: 267953 - DNA, 25 bp, Probe sequence
gaaaaagttgagcatcggcaatttt

SEQ ID NO: 267954 - DNA, 25 bp, Probe sequence
gagcatcggcaattttatcatattg

SEQ ID NO: 267955 - DNA, 25 bp, Probe sequence
gttgagcatcggcaattttatcata

SEQ ID NO: 267956 - DNA, 25 bp, Probe sequence
ggcaattttatcatattgttcgagt

SEQ ID NO: 267957 - DNA, 25 bp, Probe sequence
tgagcatcggcaattttatcatatt

SEQ ID NO: 267958 - DNA, 25 bp, Probe sequence
tcggcaattttatcatattgttcga

SEQ ID NO: 267959 - DNA, 25 bp, Probe sequence
tcatattgttcgagtataaagggaa

SEQ ID NO: 267960 - DNA, 25 bp, Probe sequence
taaatgtaatgaaggttgcgccaaa

SEQ ID NO: 267961 - DNA, 25 bp, Probe sequence
tagcgaaaaagttgagcatcggcaa

SEQ ID NO: 267962 - DNA, 25 bp, Probe sequence
tatcatattgttcgagtataaaggg

SEQ ID NO: 267963 - DNA, 25 bp, Probe sequence
ttatcatattgttcgagtataaagg

SEQ ID NO: 267964 - DNA, 25 bp, Probe sequence
ttaaatgtaatgaaggttgcgccaa

SEQ ID NO: 267965 - DNA, 25 bp, Probe sequence
ttgagcatcggcaattttatcatat

SEQ ID NO: 267966 - DNA, 25 bp, Probe sequence
atacggcaatcacaactgtcacacc

SEQ ID NO: 267967 - DNA, 25 bp, Probe sequence
atcacaactgtcacaccagcaaaaa

SEQ ID NO: 267968 - DNA, 25 bp, Probe sequence
acctgctgttcctattgcaagacca

SEQ ID NO: 267969 - DNA, 25 bp, Probe sequence
accacatacggcaatcacaactgtc

SEQ ID NO: 267970 - DNA, 25 bp, Probe sequence
actacctgctgttcctattgcaaga

SEQ ID NO: 267971 - DNA, 25 bp, Probe sequence
actagcgataaaccacatacggcaa

SEQ ID NO: 267972 - DNA, 25 bp, Probe sequence
aaaccacatacggcaatcacaactg

SEQ ID NO: 267973 - DNA, 25 bp, Probe sequence
aaaaacaactgcactacctgctgtt

SEQ ID NO: 267974 - DNA, 25 bp, Probe sequence
aactgtcacaccagcaaaaacaact

SEQ ID NO: 267975 - DNA, 25 bp, Probe sequence
caatcacaactgtcacaccagcaaa

SEQ ID NO: 267976 - DNA, 25 bp, Probe sequence
caactagcgataaaccacatacggc

SEQ ID NO: 267977 - DNA, 25 bp, Probe sequence
cacaactgtcacaccagcaaaaaca

SEQ ID NO: 267978 - DNA, 25 bp, Probe sequence
cacatacggcaatcacaactgtcac

SEQ ID NO: 267979 - DNA, 25 bp, Probe sequence
caccagcaaaaacaactgcactacc

SEQ ID NO: 267980 - DNA, 25 bp, Probe sequence
cagcaaaaacaactgcactacctgc

SEQ ID NO: 267981 - DNA, 25 bp, Probe sequence
catacggcaatcacaactgtcacac

SEQ ID NO: 267982 - DNA, 25 bp, Probe sequence
ctattgcaagaccaatgcctttaat

SEQ ID NO: 267983 - DNA, 25 bp, Probe sequence
ctacctgctgttcctattgcaagac

SEQ ID NO: 267984 - DNA, 25 bp, Probe sequence
ctgctgttcctattgcaagaccaat

SEQ ID NO: 267985 - DNA, 25 bp, Probe sequence
cctgctgttcctattgcaagaccaa

SEQ ID NO: 267986 - DNA, 25 bp, Probe sequence
gcgataaaccacatacggcaatcac

SEQ ID NO: 267987 - DNA, 25 bp, Probe sequence
gctgttcctattgcaagaccaatgc

SEQ ID NO: 267988 - DNA, 25 bp, Probe sequence
gcaaaaacaactgcactacctgctg

SEQ ID NO: 267989 - DNA, 25 bp, Probe sequence
gcaatcacaactgtcacaccagcaa

SEQ ID NO: 267990 - DNA, 25 bp, Probe sequence
gataaaccacatacggcaatcacaa

SEQ ID NO: 267991 - DNA, 25 bp, Probe sequence
gttcctattgcaagaccaatgcctt

SEQ ID NO: 267992 - DNA, 25 bp, Probe sequence
gtcacaccagcaaaaacaactgcac

SEQ ID NO: 267993 - DNA, 25 bp, Probe sequence
tgcaagaccaatgcctttaatgtaa

SEQ ID NO: 267994 - DNA, 25 bp, Probe sequence
tgccaactagcgataaaccacatac

SEQ ID NO: 267995 - DNA, 25 bp, Probe sequence
tcctattgcaagaccaatgccttta

SEQ ID NO: 267996 - DNA, 25 bp, Probe sequence
tacggcaatcacaactgtcacacca

SEQ ID NO: 267997 - DNA, 25 bp, Probe sequence
tacctgctgttcctattgcaagacc

SEQ ID NO: 267998 - DNA, 25 bp, Probe sequence
tagcgataaaccacatacggcaatc

SEQ ID NO: 267999 - DNA, 25 bp, Probe sequence
ttgcaagaccaatgcctttaatgta

SEQ ID NO: 268000 - DNA, 25 bp, Probe sequence
ataagcgatcaacttgtttatatag

SEQ ID NO: 268001 - DNA, 25 bp, Probe sequence
atcacttaatcgcattattacgata

SEQ ID NO: 268002 - DNA, 25 bp, Probe sequence
atgaagcagttaatactaacatttt

SEQ ID NO: 268003 - DNA, 25 bp, Probe sequence
agcagttaatactaacatttttaca

SEQ ID NO: 268004 - DNA, 25 bp, Probe sequence
acgatgaagcagttaatactaacat

SEQ ID NO: 268005 - DNA, 25 bp, Probe sequence
acttaatcgcattattacgatatgg

SEQ ID NO: 268006 - DNA, 25 bp, Probe sequence
acaataccaagtcgtaatattaata

SEQ ID NO: 268007 - DNA, 25 bp, Probe sequence
aataagcgatcaacttgtttatata

SEQ ID NO: 268008 - DNA, 25 bp, Probe sequence
aataccaagtcgtaatattaataat

SEQ ID NO: 268009 - DNA, 25 bp, Probe sequence
caataagcgatcaacttgtttatat

SEQ ID NO: 268010 - DNA, 25 bp, Probe sequence
cacttaatcgcattattacgatatg

SEQ ID NO: 268011 - DNA, 25 bp, Probe sequence
cttccaataagcgatcaacttgttt

SEQ ID NO: 268012 - DNA, 25 bp, Probe sequence
cttaatcgcattattacgatatggc

SEQ ID NO: 268013 - DNA, 25 bp, Probe sequence
cggtgttcatagactgtgtaaacta

SEQ ID NO: 268014 - DNA, 25 bp, Probe sequence
cgacaataccaagtcgtaatattaa

SEQ ID NO: 268015 - DNA, 25 bp, Probe sequence
cgatgaagcagttaatactaacatt

SEQ ID NO: 268016 - DNA, 25 bp, Probe sequence
ccaataagcgatcaacttgtttata

SEQ ID NO: 268017 - DNA, 25 bp, Probe sequence
gaagcagttaatactaacattttta

SEQ ID NO: 268018 - DNA, 25 bp, Probe sequence
gacaataccaagtcgtaatattaat

SEQ ID NO: 268019 - DNA, 25 bp, Probe sequence
gatgaagcagttaatactaacattt

SEQ ID NO: 268020 - DNA, 25 bp, Probe sequence
gttcatagactgtgtaaactatatt

SEQ ID NO: 268021 - DNA, 25 bp, Probe sequence
gtgttcatagactgtgtaaactata

SEQ ID NO: 268022 - DNA, 25 bp, Probe sequence
ggtgttcatagactgtgtaaactat

SEQ ID NO: 268023 - DNA, 25 bp, Probe sequence
tgttcatagactgtgtaaactatat

SEQ ID NO: 268024 - DNA, 25 bp, Probe sequence
tgaagcagttaatactaacattttt

SEQ ID NO: 268025 - DNA, 25 bp, Probe sequence
tccaataagcgatcaacttgtttat

SEQ ID NO: 268026 - DNA, 25 bp, Probe sequence
tcgacaataccaagtcgtaatatta

SEQ ID NO: 268027 - DNA, 25 bp, Probe sequence
tcacttaatcgcattattacgatat

SEQ ID NO: 268028 - DNA, 25 bp, Probe sequence
taatcgcattattacgatatggcgg

SEQ ID NO: 268029 - DNA, 25 bp, Probe sequence
taccaagtcgtaatattaataatat

SEQ ID NO: 268030 - DNA, 25 bp, Probe sequence
tatcacttaatcgcattattacgat

SEQ ID NO: 268031 - DNA, 25 bp, Probe sequence
ttaatcgcattattacgatatggcg

SEQ ID NO: 268032 - DNA, 25 bp, Probe sequence
ttccaataagcgatcaacttgttta

SEQ ID NO: 268033 - DNA, 25 bp, Probe sequence
ttcatagactgtgtaaactatattc

SEQ ID NO: 268034 - DNA, 25 bp, Probe sequence
cttagtcggcaatgtcgaagtgaca

SEQ ID NO: 268035 - DNA, 25 bp, Probe sequence
attggtgggtatttatcgtcttact

SEQ ID NO: 268036 - DNA, 25 bp, Probe sequence
atatttcatcttaaccatcgtatta

SEQ ID NO: 268037 - DNA, 25 bp, Probe sequence
atcgtcttactactcttagtcggca

SEQ ID NO: 268038 - DNA, 25 bp, Probe sequence
actactcttagtcggcaatgtcgaa

SEQ ID NO: 268039 - DNA, 25 bp, Probe sequence
catcttaaccatcgtattattctaa

SEQ ID NO: 268040 - DNA, 25 bp, Probe sequence
catatatttcatcttaaccatcgta

SEQ ID NO: 268041 - DNA, 25 bp, Probe sequence
cttactactcttagtcggcaatgtc

SEQ ID NO: 268042 - DNA, 25 bp, Probe sequence
ctactcttagtcggcaatgtcgaag

SEQ ID NO: 268043 - DNA, 25 bp, Probe sequence
ctttgtcatatatttcatcttaacc

SEQ ID NO: 268044 - DNA, 25 bp, Probe sequence
cgtcttactactcttagtcggcaat

SEQ ID NO: 268045 - DNA, 25 bp, Probe sequence
gaattggtgggtatttatcgtctta

SEQ ID NO: 268046 - DNA, 25 bp, Probe sequence
gaagtgacaggatttaaaatgctta

SEQ ID NO: 268047 - DNA, 25 bp, Probe sequence
gatctaaaaggtgtaaacatcttga

SEQ ID NO: 268048 - DNA, 25 bp, Probe sequence
gtcttactactcttagtcggcaatg

SEQ ID NO: 268049 - DNA, 25 bp, Probe sequence
gtaaacatcttgaatttaatgtcat

SEQ ID NO: 268050 - DNA, 25 bp, Probe sequence
gtcggcaatgtcgaagtgacaggat

SEQ ID NO: 268051 - DNA, 25 bp, Probe sequence
gtcatatatttcatcttaaccatcg

SEQ ID NO: 268052 - DNA, 25 bp, Probe sequence
gtgggtatttatcgtcttactactc

SEQ ID NO: 268053 - DNA, 25 bp, Probe sequence
gggtatttatcgtcttactactctt

SEQ ID NO: 268054 - DNA, 25 bp, Probe sequence
ggtatttatcgtcttactactctta

SEQ ID NO: 268055 - DNA, 25 bp, Probe sequence
tcgtcttactactcttagtcggcaa

SEQ ID NO: 268056 - DNA, 25 bp, Probe sequence
tggtgggtatttatcgtcttactac

SEQ ID NO: 268057 - DNA, 25 bp, Probe sequence
tgtcattatttatctttgtcatata

SEQ ID NO: 268058 - DNA, 25 bp, Probe sequence
tcttagtcggcaatgtcgaagtgac

SEQ ID NO: 268059 - DNA, 25 bp, Probe sequence
tcttactactcttagtcggcaatgt

SEQ ID NO: 268060 - DNA, 25 bp, Probe sequence
tactcttagtcggcaatgtcgaagt

SEQ ID NO: 268061 - DNA, 25 bp, Probe sequence
tactactcttagtcggcaatgtcga

SEQ ID NO: 268062 - DNA, 25 bp, Probe sequence
tatcgtcttactactcttagtcggc

SEQ ID NO: 268063 - DNA, 25 bp, Probe sequence
tatttatcgtcttactactcttagt

SEQ ID NO: 268064 - DNA, 25 bp, Probe sequence
tttcatcttaaccatcgtattattc

SEQ ID NO: 268065 - DNA, 25 bp, Probe sequence
ttatcgtcttactactcttagtcgg

SEQ ID NO: 268066 - DNA, 25 bp, Probe sequence
ttatctttgtcatatatttcatctt

SEQ ID NO: 268067 - DNA, 25 bp, Probe sequence
ttaatgtcattatttatctttgtca

SEQ ID NO: 268068 - DNA, 25 bp, Probe sequence
attgacgcatctatgtccacgatgc

SEQ ID NO: 268069 - DNA, 25 bp, Probe sequence
attaacgatttcaatcctgacacag

SEQ ID NO: 268070 - DNA, 25 bp, Probe sequence
atcctgacacagatagcattcctga

SEQ ID NO: 268071 - DNA, 25 bp, Probe sequence
atgaattgacgcatctatgtccacg

SEQ ID NO: 268072 - DNA, 25 bp, Probe sequence
atggtcaatacaatgtaaatggcga

SEQ ID NO: 268073 - DNA, 25 bp, Probe sequence
agaagccttgtctgacgctgtagca

SEQ ID NO: 268074 - DNA, 25 bp, Probe sequence
agccttgtctgacgctgtagcagaa

SEQ ID NO: 268075 - DNA, 25 bp, Probe sequence
accgttcatcctgaattaaaatatg

SEQ ID NO: 268076 - DNA, 25 bp, Probe sequence
acgcatctatgtccacgatgccaac

SEQ ID NO: 268077 - DNA, 25 bp, Probe sequence
acattaacgatttcaatcctgacac

SEQ ID NO: 268078 - DNA, 25 bp, Probe sequence
aacgatttcaatcctgacacagata

SEQ ID NO: 268079 - DNA, 25 bp, Probe sequence
aagccttgtctgacgctgtagcaga

SEQ ID NO: 268080 - DNA, 25 bp, Probe sequence
aattgacgcatctatgtccacgatg

SEQ ID NO: 268081 - DNA, 25 bp, Probe sequence
cagaagccttgtctgacgctgtagc

SEQ ID NO: 268082 - DNA, 25 bp, Probe sequence
ctgacacagatagcattcctgaatc

SEQ ID NO: 268083 - DNA, 25 bp, Probe sequence
cgcatctatgtccacgatgccaaca

SEQ ID NO: 268084 - DNA, 25 bp, Probe sequence
ccttgtctgacgctgtagcagaagc

SEQ ID NO: 268085 - DNA, 25 bp, Probe sequence
gccttgtctgacgctgtagcagaag

SEQ ID NO: 268086 - DNA, 25 bp, Probe sequence
gcatctatgtccacgatgccaacaa

SEQ ID NO: 268087 - DNA, 25 bp, Probe sequence
gcagaagccttgtctgacgctgtag

SEQ ID NO: 268088 - DNA, 25 bp, Probe sequence
gaattgacgcatctatgtccacgat

SEQ ID NO: 268089 - DNA, 25 bp, Probe sequence
gacgcatctatgtccacgatgccaa

SEQ ID NO: 268090 - DNA, 25 bp, Probe sequence
gatgaattgacgcatctatgtccac

SEQ ID NO: 268091 - DNA, 25 bp, Probe sequence
gttcatcctgaattaaaatatggtc

SEQ ID NO: 268092 - DNA, 25 bp, Probe sequence
gtaaagaattagagtatgttgtagc

SEQ ID NO: 268093 - DNA, 25 bp, Probe sequence
ggtaacattaacgatttcaatcctg

SEQ ID NO: 268094 - DNA, 25 bp, Probe sequence
tgacgcatctatgtccacgatgcca

SEQ ID NO: 268095 - DNA, 25 bp, Probe sequence
tgaattgacgcatctatgtccacga

SEQ ID NO: 268096 - DNA, 25 bp, Probe sequence
tcctgacacagatagcattcctgaa

SEQ ID NO: 268097 - DNA, 25 bp, Probe sequence
taacgatttcaatcctgacacagat

SEQ ID NO: 268098 - DNA, 25 bp, Probe sequence
taacattaacgatttcaatcctgac

SEQ ID NO: 268099 - DNA, 25 bp, Probe sequence
taggtaacattaacgatttcaatcc

SEQ ID NO: 268100 - DNA, 25 bp, Probe sequence
ttgacgcatctatgtccacgatgcc

SEQ ID NO: 268101 - DNA, 25 bp, Probe sequence
ttaacgatttcaatcctgacacaga

SEQ ID NO: 268102 - DNA, 25 bp, Probe sequence
atatatagatgctcataacatcgat

SEQ ID NO: 268103 - DNA, 25 bp, Probe sequence
atatagatgctcataacatcgatgt

SEQ ID NO: 268104 - DNA, 25 bp, Probe sequence
atctcagggaatgctatggttaaag

SEQ ID NO: 268105 - DNA, 25 bp, Probe sequence
atgctcataacatcgatgtagttag

SEQ ID NO: 268106 - DNA, 25 bp, Probe sequence
agacatatatagatgctcataacat

SEQ ID NO: 268107 - DNA, 25 bp, Probe sequence
acttgggcatggaattatggtagaa

SEQ ID NO: 268108 - DNA, 25 bp, Probe sequence
acatatatagatgctcataacatcg

SEQ ID NO: 268109 - DNA, 25 bp, Probe sequence
aaatctcagggaatgctatggttaa

SEQ ID NO: 268110 - DNA, 25 bp, Probe sequence
aaaatctcagggaatgctatggtta

SEQ ID NO: 268111 - DNA, 25 bp, Probe sequence
aatctcagggaatgctatggttaaa

SEQ ID NO: 268112 - DNA, 25 bp, Probe sequence
cagacatatatagatgctcataaca

SEQ ID NO: 268113 - DNA, 25 bp, Probe sequence
cagggaatgctatggttaaagttaa

SEQ ID NO: 268114 - DNA, 25 bp, Probe sequence
cataacatcgatgtagttagaagaa

SEQ ID NO: 268115 - DNA, 25 bp, Probe sequence
catatatagatgctcataacatcga

SEQ ID NO: 268116 - DNA, 25 bp, Probe sequence
cttgggcatggaattatggtagaaa

SEQ ID NO: 268117 - DNA, 25 bp, Probe sequence
ctcagggaatgctatggttaaagtt

SEQ ID NO: 268118 - DNA, 25 bp, Probe sequence
ctcataacatcgatgtagttagaag

SEQ ID NO: 268119 - DNA, 25 bp, Probe sequence
cgaaaatctcagggaatgctatggt

SEQ ID NO: 268120 - DNA, 25 bp, Probe sequence
gcgaaaatctcagggaatgctatgg

SEQ ID NO: 268121 - DNA, 25 bp, Probe sequence
gctcataacatcgatgtagttagaa

SEQ ID NO: 268122 - DNA, 25 bp, Probe sequence
gaaaatctcagggaatgctatggtt

SEQ ID NO: 268123 - DNA, 25 bp, Probe sequence
gacatatatagatgctcataacatc

SEQ ID NO: 268124 - DNA, 25 bp, Probe sequence
tgggcatggaattatggtagaaacc

SEQ ID NO: 268125 - DNA, 25 bp, Probe sequence
tcagggaatgctatggttaaagtta

SEQ ID NO: 268126 - DNA, 25 bp, Probe sequence
tgctcataacatcgatgtagttaga

SEQ ID NO: 268127 - DNA, 25 bp, Probe sequence
tctcagggaatgctatggttaaagt

SEQ ID NO: 268128 - DNA, 25 bp, Probe sequence
tcataacatcgatgtagttagaaga

SEQ ID NO: 268129 - DNA, 25 bp, Probe sequence
tatatagatgctcataacatcgatg

SEQ ID NO: 268130 - DNA, 25 bp, Probe sequence
ttgggcatggaattatggtagaaac

SEQ ID NO: 268131 - DNA, 25 bp, Probe sequence
attcattggcattactgtcagattc

SEQ ID NO: 268132 - DNA, 25 bp, Probe sequence
atcatcgacccaatcattagtattg

SEQ ID NO: 268133 - DNA, 25 bp, Probe sequence
atctatgttggccatttattttgca

SEQ ID NO: 268134 - DNA, 25 bp, Probe sequence
agcacttggtttatctatgttggcc

SEQ ID NO: 268135 - DNA, 25 bp, Probe sequence
acttggtttatctatgttggccatt

SEQ ID NO: 268136 - DNA, 25 bp, Probe sequence
aaagacgctgtgggcatcactaatc

SEQ ID NO: 268137 - DNA, 25 bp, Probe sequence
aaaaagccgactgcacgatacacat

SEQ ID NO: 268138 - DNA, 25 bp, Probe sequence
aaaaagacgctgtgggcatcactaa

SEQ ID NO: 268139 - DNA, 25 bp, Probe sequence
aatattaacctgagaagctataaag

SEQ ID NO: 268140 - DNA, 25 bp, Probe sequence
cattactgtcagattcatttcatat

SEQ ID NO: 268141 - DNA, 25 bp, Probe sequence
cgacgcatttatttaggagtggcaa

SEQ ID NO: 268142 - DNA, 25 bp, Probe sequence
cgctgtgggcatcactaatcatcac

SEQ ID NO: 268143 - DNA, 25 bp, Probe sequence
ccgactgcacgatacacatttggat

SEQ ID NO: 268144 - DNA, 25 bp, Probe sequence
gcgacaatattaaatacgacgcatt

SEQ ID NO: 268145 - DNA, 25 bp, Probe sequence
gcatcatcgacccaatcattagtat

SEQ ID NO: 268146 - DNA, 25 bp, Probe sequence
gcatcactaatcatcacattgttat

SEQ ID NO: 268147 - DNA, 25 bp, Probe sequence
gcacgatacacatttggatatttaa

SEQ ID NO: 268148 - DNA, 25 bp, Probe sequence
gcaagtaaaaagccgactgcacgat

SEQ ID NO: 268149 - DNA, 25 bp, Probe sequence
gaatgggaaaaaggcgaatacgata

SEQ ID NO: 268150 - DNA, 25 bp, Probe sequence
gactgcacgatacacatttggatat

SEQ ID NO: 268151 - DNA, 25 bp, Probe sequence
gacgctgtgggcatcactaatcatc

SEQ ID NO: 268152 - DNA, 25 bp, Probe sequence
gatgtattagcacttggtttatcta

SEQ ID NO: 268153 - DNA, 25 bp, Probe sequence
gttggccatttattttgcaagtaaa

SEQ ID NO: 268154 - DNA, 25 bp, Probe sequence
gtatctaattcattggcattactgt

SEQ ID NO: 268155 - DNA, 25 bp, Probe sequence
ggtttatctatgttggccatttatt

SEQ ID NO: 268156 - DNA, 25 bp, Probe sequence
ggagtggcaaacgtatgaatgggaa

SEQ ID NO: 268157 - DNA, 25 bp, Probe sequence
tgggcatcactaatcatcacattgt

SEQ ID NO: 268158 - DNA, 25 bp, Probe sequence
tcaatattattttgactgttatcct

SEQ ID NO: 268159 - DNA, 25 bp, Probe sequence
taatcatcacattgttatttacagt

SEQ ID NO: 268160 - DNA, 25 bp, Probe sequence
tacgacgcatttatttaggagtggc

SEQ ID NO: 268161 - DNA, 25 bp, Probe sequence
tactcgtcaatattattttgactgt

SEQ ID NO: 268162 - DNA, 25 bp, Probe sequence
tacggaagcattaatattaacctga

SEQ ID NO: 268163 - DNA, 25 bp, Probe sequence
tatgttggccatttattttgcaagt

SEQ ID NO: 268164 - DNA, 25 bp, Probe sequence
ttggcattactgtcagattcatttc

SEQ ID NO: 268165 - DNA, 25 bp, Probe sequence
agtcgtaccaattgaagtacctact

SEQ ID NO: 268166 - DNA, 25 bp, Probe sequence
attgattataggatttaaaacttga

SEQ ID NO: 268167 - DNA, 25 bp, Probe sequence
attgaagtacctactactaattttg

SEQ ID NO: 268168 - DNA, 25 bp, Probe sequence
atggtacaatcgcaattaacaaaat

SEQ ID NO: 268169 - DNA, 25 bp, Probe sequence
atggtagtgaccttaaaatattgat

SEQ ID NO: 268170 - DNA, 25 bp, Probe sequence
atggcagcagtcgtaccaattgaag

SEQ ID NO: 268171 - DNA, 25 bp, Probe sequence
agtgaccttaaaatattgattatag

SEQ ID NO: 268172 - DNA, 25 bp, Probe sequence
agtacctactactaattttgtgaat

SEQ ID NO: 268173 - DNA, 25 bp, Probe sequence
agcagtcgtaccaattgaagtacct

SEQ ID NO: 268174 - DNA, 25 bp, Probe sequence
accaattgaagtacctactactaat

SEQ ID NO: 268175 - DNA, 25 bp, Probe sequence
acaaaataataaatggtagtgacct

SEQ ID NO: 268176 - DNA, 25 bp, Probe sequence
caattgaagtacctactactaattt

SEQ ID NO: 268177 - DNA, 25 bp, Probe sequence
cagtcgtaccaattgaagtacctac

SEQ ID NO: 268178 - DNA, 25 bp, Probe sequence
cagcagtcgtaccaattgaagtacc

SEQ ID NO: 268179 - DNA, 25 bp, Probe sequence
cgtaccaattgaagtacctactact

SEQ ID NO: 268180 - DNA, 25 bp, Probe sequence
gtcgtaccaattgaagtacctacta

SEQ ID NO: 268181 - DNA, 25 bp, Probe sequence
cctactactaattttgtgaatggta

SEQ ID NO: 268182 - DNA, 25 bp, Probe sequence
gcagtcgtaccaattgaagtaccta

SEQ ID NO: 268183 - DNA, 25 bp, Probe sequence
gcagcagtcgtaccaattgaagtac

SEQ ID NO: 268184 - DNA, 25 bp, Probe sequence
gaatggtacaatcgcaattaacaaa

SEQ ID NO: 268185 - DNA, 25 bp, Probe sequence
gaagtacctactactaattttgtga

SEQ ID NO: 268186 - DNA, 25 bp, Probe sequence
gtaccaattgaagtacctactacta

SEQ ID NO: 268187 - DNA, 25 bp, Probe sequence
gtacctactactaattttgtgaatg

SEQ ID NO: 268188 - DNA, 25 bp, Probe sequence
gtgaatggtacaatcgcaattaaca

SEQ ID NO: 268189 - DNA, 25 bp, Probe sequence
ggtacaatcgcaattaacaaaataa

SEQ ID NO: 268190 - DNA, 25 bp, Probe sequence
ggtagtgaccttaaaatattgatta

SEQ ID NO: 268191 - DNA, 25 bp, Probe sequence
ggcagcagtcgtaccaattgaagta

SEQ ID NO: 268192 - DNA, 25 bp, Probe sequence
tggcagcagtcgtaccaattgaagt

SEQ ID NO: 268193 - DNA, 25 bp, Probe sequence
tgtgaatggtacaatcgcaattaac

SEQ ID NO: 268194 - DNA, 25 bp, Probe sequence
tgaagtacctactactaattttgtg

SEQ ID NO: 268195 - DNA, 25 bp, Probe sequence
tgaatggtacaatcgcaattaacaa

SEQ ID NO: 268196 - DNA, 25 bp, Probe sequence
tactactaattttgtgaatggtaca

SEQ ID NO: 268197 - DNA, 25 bp, Probe sequence
tacctactactaattttgtgaatgg

SEQ ID NO: 268198 - DNA, 25 bp, Probe sequence
taccaattgaagtacctactactaa

SEQ ID NO: 268199 - DNA, 25 bp, Probe sequence
atattcaaacactatcgattggatc

SEQ ID NO: 268200 - DNA, 25 bp, Probe sequence
agtaacgcaaatagtataatgctcg

SEQ ID NO: 268201 - DNA, 25 bp, Probe sequence
agcgatactcagtaacgcaaatagt

SEQ ID NO: 268202 - DNA, 25 bp, Probe sequence
acctacacatattcaaacactatcg

SEQ ID NO: 268203 - DNA, 25 bp, Probe sequence
acgcaaatagtataatgctcggtca

SEQ ID NO: 268204 - DNA, 25 bp, Probe sequence
actcagtaacgcaaatagtataatg

SEQ ID NO: 268205 - DNA, 25 bp, Probe sequence
acatattcaaacactatcgattgga

SEQ ID NO: 268206 - DNA, 25 bp, Probe sequence
acagcgatactcagtaacgcaaata

SEQ ID NO: 268207 - DNA, 25 bp, Probe sequence
acacatattcaaacactatcgattg

SEQ ID NO: 268208 - DNA, 25 bp, Probe sequence
aaatagtataatgctcggtcataat

SEQ ID NO: 268209 - DNA, 25 bp, Probe sequence
aaacagcgatactcagtaacgcaaa

SEQ ID NO: 268210 - DNA, 25 bp, Probe sequence
aacagcgatactcagtaacgcaaat

SEQ ID NO: 268211 - DNA, 25 bp, Probe sequence
aacgcaaatagtataatgctcggtc

SEQ ID NO: 268212 - DNA, 25 bp, Probe sequence
aacctacacatattcaaacactatc

SEQ ID NO: 268213 - DNA, 25 bp, Probe sequence
caaatagtataatgctcggtcataa

SEQ ID NO: 268214 - DNA, 25 bp, Probe sequence
cacatattcaaacactatcgattgg

SEQ ID NO: 268215 - DNA, 25 bp, Probe sequence
cagcgatactcagtaacgcaaatag

SEQ ID NO: 268216 - DNA, 25 bp, Probe sequence
cagtaacgcaaatagtataatgctc

SEQ ID NO: 268217 - DNA, 25 bp, Probe sequence
catattcaaacactatcgattggat

SEQ ID NO: 268218 - DNA, 25 bp, Probe sequence
ctacacatattcaaacactatcgat

SEQ ID NO: 268219 - DNA, 25 bp, Probe sequence
ctcagtaacgcaaatagtataatgc

SEQ ID NO: 268220 - DNA, 25 bp, Probe sequence
cgatactcagtaacgcaaatagtat

SEQ ID NO: 268221 - DNA, 25 bp, Probe sequence
cgcaaatagtataatgctcggtcat

SEQ ID NO: 268222 - DNA, 25 bp, Probe sequence
cctacacatattcaaacactatcga

SEQ ID NO: 268223 - DNA, 25 bp, Probe sequence
gcgatactcagtaacgcaaatagta

SEQ ID NO: 268224 - DNA, 25 bp, Probe sequence
gcaaatagtataatgctcggtcata

SEQ ID NO: 268225 - DNA, 25 bp, Probe sequence
gaacctacacatattcaaacactat

SEQ ID NO: 268226 - DNA, 25 bp, Probe sequence
gatactcagtaacgcaaatagtata

SEQ ID NO: 268227 - DNA, 25 bp, Probe sequence
gattcaccctagagaaatattcaaa

SEQ ID NO: 268228 - DNA, 25 bp, Probe sequence
gtaacgcaaatagtataatgctcgg

SEQ ID NO: 268229 - DNA, 25 bp, Probe sequence
tgattcaccctagagaaatattcaa

SEQ ID NO: 268230 - DNA, 25 bp, Probe sequence
taacgcaaatagtataatgctcggt

SEQ ID NO: 268231 - DNA, 25 bp, Probe sequence
tacacatattcaaacactatcgatt

SEQ ID NO: 268232 - DNA, 25 bp, Probe sequence
tactcagtaacgcaaatagtataat

SEQ ID NO: 268233 - DNA, 25 bp, Probe sequence
atttttcacaattacaaaggccaag

SEQ ID NO: 268234 - DNA, 25 bp, Probe sequence
atatatgacaattttaccattacat

SEQ ID NO: 268235 - DNA, 25 bp, Probe sequence
ataatttcatggtaggacctttcgt

SEQ ID NO: 268236 - DNA, 25 bp, Probe sequence
atgtccaaatggtagtgagaaacga

SEQ ID NO: 268237 - DNA, 25 bp, Probe sequence
aggacttactccgcataagtttaat

SEQ ID NO: 268238 - DNA, 25 bp, Probe sequence
agaagagtctggctacagctttgat

SEQ ID NO: 268239 - DNA, 25 bp, Probe sequence
acagccgagctatttagatttcttt

SEQ ID NO: 268240 - DNA, 25 bp, Probe sequence
aaagaacaagagctataccaatata

SEQ ID NO: 268241 - DNA, 25 bp, Probe sequence
aaacgttcacaaagagctgatagta

SEQ ID NO: 268242 - DNA, 25 bp, Probe sequence
aacccaggcattgaatacactgtca

SEQ ID NO: 268243 - DNA, 25 bp, Probe sequence
aagacgtagctctcaaaattttgga

SEQ ID NO: 268244 - DNA, 25 bp, Probe sequence
aagtgttgattattacccagtggat

SEQ ID NO: 268245 - DNA, 25 bp, Probe sequence
aatggaaactattgctaagcttttt

SEQ ID NO: 268246 - DNA, 25 bp, Probe sequence
aaggttaattgctgatatacatatg

SEQ ID NO: 268247 - DNA, 25 bp, Probe sequence
aatcaattacccttagatagtctaa

SEQ ID NO: 268248 - DNA, 25 bp, Probe sequence
cagagtatactgagcttgattggtt

SEQ ID NO: 268249 - DNA, 25 bp, Probe sequence
ggaagctactttgtaacccaggcat

SEQ ID NO: 268250 - DNA, 25 bp, Probe sequence
ctggctacagctttgataatttcat

SEQ ID NO: 268251 - DNA, 25 bp, Probe sequence
gaaacaatttttcaatttctcgcaa

SEQ ID NO: 268252 - DNA, 25 bp, Probe sequence
gaaagtgggacgtagcagaatttta

SEQ ID NO: 268253 - DNA, 25 bp, Probe sequence
gagcttgattggttaattgcagata

SEQ ID NO: 268254 - DNA, 25 bp, Probe sequence
gagagaatgctatgccatcagatga

SEQ ID NO: 268255 - DNA, 25 bp, Probe sequence
gagagtgcaaataaacagccgagct

SEQ ID NO: 268256 - DNA, 25 bp, Probe sequence
gatttctttttacaagctaagtttg

SEQ ID NO: 268257 - DNA, 25 bp, Probe sequence
gttaaactattcaaatgtccaaatg

SEQ ID NO: 268258 - DNA, 25 bp, Probe sequence
gtatatctaagttgattgatcatga

SEQ ID NO: 268259 - DNA, 25 bp, Probe sequence
gtgattacgtaagatatgctattga

SEQ ID NO: 268260 - DNA, 25 bp, Probe sequence
tggtaggacctttcgtagaagactt

SEQ ID NO: 268261 - DNA, 25 bp, Probe sequence
tgaattaaatcatctcctatataaa

SEQ ID NO: 268262 - DNA, 25 bp, Probe sequence
tagaattaggacttactccgcataa

SEQ ID NO: 268263 - DNA, 25 bp, Probe sequence
tagtacattaagacgtagctctcaa

SEQ ID NO: 268264 - DNA, 25 bp, Probe sequence
tatacatttaatggtgtcgcaaaag

SEQ ID NO: 268265 - DNA, 25 bp, Probe sequence
ttacccagtggatatcaattccaaa

SEQ ID NO: 268266 - DNA, 25 bp, Probe sequence
ttgcagatatgctaaaacgttcaca

SEQ ID NO: 268267 - DNA, 25 bp, Probe sequence
attaccattaaaagatttcaaacat

SEQ ID NO: 268268 - DNA, 25 bp, Probe sequence
atattcatatacaacaatttccaga

SEQ ID NO: 268269 - DNA, 25 bp, Probe sequence
atacctatatatctttatgatacta

SEQ ID NO: 268270 - DNA, 25 bp, Probe sequence
atggtatacaacactgatattacag

SEQ ID NO: 268271 - DNA, 25 bp, Probe sequence
atggagaaccacttttagtatataa

SEQ ID NO: 268272 - DNA, 25 bp, Probe sequence
atggcgtattaatagaagttgaggc

SEQ ID NO: 268273 - DNA, 25 bp, Probe sequence
agttgaggccttacattcatttaaa

SEQ ID NO: 268274 - DNA, 25 bp, Probe sequence
agatgtgtttagtcgtaacttctct

SEQ ID NO: 268275 - DNA, 25 bp, Probe sequence
acattatcagagattatggcgtatt

SEQ ID NO: 268276 - DNA, 25 bp, Probe sequence
acactgatattacagcatttattca

SEQ ID NO: 268277 - DNA, 25 bp, Probe sequence
aaactgtttatacctatatatcttt

SEQ ID NO: 268278 - DNA, 25 bp, Probe sequence
aaaacatagcgacagcaagactaga

SEQ ID NO: 268279 - DNA, 25 bp, Probe sequence
aaaaggtatgggggcaatgcttgta

SEQ ID NO: 268280 - DNA, 25 bp, Probe sequence
aagtcaattggaaaagttatcagat

SEQ ID NO: 268281 - DNA, 25 bp, Probe sequence
aagggaatcatggagaaccactttt

SEQ ID NO: 268282 - DNA, 25 bp, Probe sequence
aatgataaacatattccctaaaaat

SEQ ID NO: 268283 - DNA, 25 bp, Probe sequence
aatttccagagaatgatagcccttc

SEQ ID NO: 268284 - DNA, 25 bp, Probe sequence
cagcatttattcagtttaggttagt

SEQ ID NO: 268285 - DNA, 25 bp, Probe sequence
gcccttcttatatggtatacaacac

SEQ ID NO: 268286 - DNA, 25 bp, Probe sequence
gcgacagcaagactagaaatcattt

SEQ ID NO: 268287 - DNA, 25 bp, Probe sequence
gaatgatagcccttcttatatggta

SEQ ID NO: 268288 - DNA, 25 bp, Probe sequence
gaaatcattttattggtatggcttt

SEQ ID NO: 268289 - DNA, 25 bp, Probe sequence
gacttaggattctttgatactacta

SEQ ID NO: 268290 - DNA, 25 bp, Probe sequence
gatagcccttcttatatggtataca

SEQ ID NO: 268291 - DNA, 25 bp, Probe sequence
gattttgatcacgaaggatacagaa

SEQ ID NO: 268292 - DNA, 25 bp, Probe sequence
gtttaggttagttgggcgatcagaa

SEQ ID NO: 268293 - DNA, 25 bp, Probe sequence
gtcgtaacttctctaataaaatgat

SEQ ID NO: 268294 - DNA, 25 bp, Probe sequence
gtgtttagtcgtaacttctctaata

SEQ ID NO: 268295 - DNA, 25 bp, Probe sequence
ggggaatttagattttgatcacgaa

SEQ ID NO: 268296 - DNA, 25 bp, Probe sequence
ggttagttgggcgatcagaaaataa

SEQ ID NO: 268297 - DNA, 25 bp, Probe sequence
ggatacagaaaactattaccattaa

SEQ ID NO: 268298 - DNA, 25 bp, Probe sequence
tgggggcaatgcttgtaagtcaatt

SEQ ID NO: 268299 - DNA, 25 bp, Probe sequence
tcattttattggtatggcttttaat

SEQ ID NO: 268300 - DNA, 25 bp, Probe sequence
taggattctttgatactactaaaaa

SEQ ID NO: 268301 - DNA, 25 bp, Probe sequence
attatgataataaacctcaaaattt

SEQ ID NO: 268302 - DNA, 25 bp, Probe sequence
atttctagtagaagattcacatgat

SEQ ID NO: 268303 - DNA, 25 bp, Probe sequence
atatatatctgactacgttaaaaat

SEQ ID NO: 268304 - DNA, 25 bp, Probe sequence
atatgcagatgaagattttaaccaa

SEQ ID NO: 268305 - DNA, 25 bp, Probe sequence
atagttacaaacttttaattgatga

SEQ ID NO: 268306 - DNA, 25 bp, Probe sequence
atagcagaaagcaatcaaacaacag

SEQ ID NO: 268307 - DNA, 25 bp, Probe sequence
ataaatatatatctgactacgttaa

SEQ ID NO: 268308 - DNA, 25 bp, Probe sequence
accttagattacgataatgtatcaa

SEQ ID NO: 268309 - DNA, 25 bp, Probe sequence
acaatggtaatgtgtttcaaacgaa

SEQ ID NO: 268310 - DNA, 25 bp, Probe sequence
aaagtattacaatccaactgaatta

SEQ ID NO: 268311 - DNA, 25 bp, Probe sequence
aaagatgttgattataattccaaaa

SEQ ID NO: 268312 - DNA, 25 bp, Probe sequence
aaaccaacaatggtaatgtgtttca

SEQ ID NO: 268313 - DNA, 25 bp, Probe sequence
aacactggaatttacaaatatcagc

SEQ ID NO: 268314 - DNA, 25 bp, Probe sequence
aactgaattaagtgtatatgcgatt

SEQ ID NO: 268315 - DNA, 25 bp, Probe sequence
aacgaaatataccttagattacgat

SEQ ID NO: 268316 - DNA, 25 bp, Probe sequence
aagtgtatatgcgattggaaaatta

SEQ ID NO: 268317 - DNA, 25 bp, Probe sequence
aaggttaagctaaacaatgatagtt

SEQ ID NO: 268318 - DNA, 25 bp, Probe sequence
aatgggactttgacaggaaaaatag

SEQ ID NO: 268319 - DNA, 25 bp, Probe sequence
aatataccttagattacgataatgt

SEQ ID NO: 268320 - DNA, 25 bp, Probe sequence
caattcacaatgggactttgacagg

SEQ ID NO: 268321 - DNA, 25 bp, Probe sequence
cagaattaggcaagttctttattgg

SEQ ID NO: 268322 - DNA, 25 bp, Probe sequence
gcaatcaaacaacagaattaggcaa

SEQ ID NO: 268323 - DNA, 25 bp, Probe sequence
gaattaagtgtatatgcgattggaa

SEQ ID NO: 268324 - DNA, 25 bp, Probe sequence
gaagattcaattcacaatgggactt

SEQ ID NO: 268325 - DNA, 25 bp, Probe sequence
gaaagtattacaatccaactgaatt

SEQ ID NO: 268326 - DNA, 25 bp, Probe sequence
gaaagaatttaataacactggaatt

SEQ ID NO: 268327 - DNA, 25 bp, Probe sequence
gactacgttaaaaataactctcaat

SEQ ID NO: 268328 - DNA, 25 bp, Probe sequence
gatgaagattttaaccaaagctggt

SEQ ID NO: 268329 - DNA, 25 bp, Probe sequence
gattcaattcacaatgggactttga

SEQ ID NO: 268330 - DNA, 25 bp, Probe sequence
gtttcaaacgaaatataccttagat

SEQ ID NO: 268331 - DNA, 25 bp, Probe sequence
ggaatttacaaatatcagcaagaaa

SEQ ID NO: 268332 - DNA, 25 bp, Probe sequence
taatgtatcaaatgaatttctagta

SEQ ID NO: 268333 - DNA, 25 bp, Probe sequence
taagttttaaggaatctcaaataag

SEQ ID NO: 268334 - DNA, 25 bp, Probe sequence
ttcacaatgggactttgacaggaaa

SEQ ID NO: 268335 - DNA, 25 bp, Probe sequence
attaaacatttatacgataccaaag

SEQ ID NO: 268336 - DNA, 25 bp, Probe sequence
attagaggctaacttattaagcgaa

SEQ ID NO: 268337 - DNA, 25 bp, Probe sequence
atattggttatgctcgtgtatctac

SEQ ID NO: 268338 - DNA, 25 bp, Probe sequence
atatcaatacaaaagacccaatggg

SEQ ID NO: 268339 - DNA, 25 bp, Probe sequence
atcagctagagcaagaggtaacatg

SEQ ID NO: 268340 - DNA, 25 bp, Probe sequence
agacgctttgagtaattttggttgt

SEQ ID NO: 268341 - DNA, 25 bp, Probe sequence
aaaggtttagaatcagctagagcaa

SEQ ID NO: 268342 - DNA, 25 bp, Probe sequence
aagcaactgatagatttagcccaat

SEQ ID NO: 268343 - DNA, 25 bp, Probe sequence
ctgatagatttagcccaatggttag

SEQ ID NO: 268344 - DNA, 25 bp, Probe sequence
ctttgagtaattttggttgtgagaa

SEQ ID NO: 268345 - DNA, 25 bp, Probe sequence
gctcgtgtatctaccagagatcaaa

SEQ ID NO: 268346 - DNA, 25 bp, Probe sequence
gctagatagattaggcaggactact

SEQ ID NO: 268347 - DNA, 25 bp, Probe sequence
gcttttgctgaattagaggctaact

SEQ ID NO: 268348 - DNA, 25 bp, Probe sequence
gaaggcgacactttagttatttaca

SEQ ID NO: 268349 - DNA, 25 bp, Probe sequence
gacactttagttatttacaagctag

SEQ ID NO: 268350 - DNA, 25 bp, Probe sequence
gagcaagaggtaacatgggaggcag

SEQ ID NO: 268351 - DNA, 25 bp, Probe sequence
gagtgcttttgctgaattagaggct

SEQ ID NO: 268352 - DNA, 25 bp, Probe sequence
gataccaaagaatatacaggacaag

SEQ ID NO: 268353 - DNA, 25 bp, Probe sequence
gatttagcccaatggttagaaaata

SEQ ID NO: 268354 - DNA, 25 bp, Probe sequence
gtttagatttacaaatagacgcttt

SEQ ID NO: 268355 - DNA, 25 bp, Probe sequence
gtatatcgcattttacgagagttta

SEQ ID NO: 268356 - DNA, 25 bp, Probe sequence
gtatctaccagagatcaaagtttag

SEQ ID NO: 268357 - DNA, 25 bp, Probe sequence
gtagagatactgtatatcgcatttt

SEQ ID NO: 268358 - DNA, 25 bp, Probe sequence
gtgggcgtaaagtaaatagaactga

SEQ ID NO: 268359 - DNA, 25 bp, Probe sequence
gggaaagatgttttttacaatgatg

SEQ ID NO: 268360 - DNA, 25 bp, Probe sequence
gggaggcagaaaagcaatgccacaa

SEQ ID NO: 268361 - DNA, 25 bp, Probe sequence
ggttatgctcgtgtatctaccagag

SEQ ID NO: 268362 - DNA, 25 bp, Probe sequence
tggccaatattggttatgctcgtgt

SEQ ID NO: 268363 - DNA, 25 bp, Probe sequence
tacaatgatgagtgcttttgctgaa

SEQ ID NO: 268364 - DNA, 25 bp, Probe sequence
tacgtgaaggcgacactttagttat

SEQ ID NO: 268365 - DNA, 25 bp, Probe sequence
taggcaggactactaagcaactgat

SEQ ID NO: 268366 - DNA, 25 bp, Probe sequence
tatgctcgtgtatctaccagagatc

SEQ ID NO: 268367 - DNA, 25 bp, Probe sequence
tatttagcgaaaaagttagtgggcg

SEQ ID NO: 268368 - DNA, 25 bp, Probe sequence
ttatttacgtgaaggcgacacttta

SEQ ID NO: 268369 - DNA, 25 bp, Probe sequence
attcaactatgcaatacttccacaa

SEQ ID NO: 268370 - DNA, 25 bp, Probe sequence
attttttaaagcaacaagcaccagc

SEQ ID NO: 268371 - DNA, 25 bp, Probe sequence
atacgatactatgtctaatgattac

SEQ ID NO: 268372 - DNA, 25 bp, Probe sequence
atgatattgataatcctttcttaga

SEQ ID NO: 268373 - DNA, 25 bp, Probe sequence
acgaggaaacgaaatatcaagcaat

SEQ ID NO: 268374 - DNA, 25 bp, Probe sequence
actctatatgagtttaaaagcctaa

SEQ ID NO: 268375 - DNA, 25 bp, Probe sequence
actatgcaatacttccacaaagaat

SEQ ID NO: 268376 - DNA, 25 bp, Probe sequence
aaattacaatcttctctgcctaatg

SEQ ID NO: 268377 - DNA, 25 bp, Probe sequence
aaaagcctaacagactacccagcta

SEQ ID NO: 268378 - DNA, 25 bp, Probe sequence
aacagcccgataaacctaattcagc

SEQ ID NO: 268379 - DNA, 25 bp, Probe sequence
aacattttactttgtctgcactaac

SEQ ID NO: 268380 - DNA, 25 bp, Probe sequence
aacctaattcagctattgatttaac

SEQ ID NO: 268381 - DNA, 25 bp, Probe sequence
aatcttctctgcctaatgaaaaatt

SEQ ID NO: 268382 - DNA, 25 bp, Probe sequence
aataaattacaatcttctctgccta

SEQ ID NO: 268383 - DNA, 25 bp, Probe sequence
aatttgctagatgattatgaaactc

SEQ ID NO: 268384 - DNA, 25 bp, Probe sequence
ctttgtctgcactaactattaaaaa

SEQ ID NO: 268385 - DNA, 25 bp, Probe sequence
gcctaacagactacccagctaaaat

SEQ ID NO: 268386 - DNA, 25 bp, Probe sequence
gcccgataaacctaattcagctatt

SEQ ID NO: 268387 - DNA, 25 bp, Probe sequence
gctagtttaagtaagatacctttag

SEQ ID NO: 268388 - DNA, 25 bp, Probe sequence
gcaacaagcaccagctattgaacaa

SEQ ID NO: 268389 - DNA, 25 bp, Probe sequence
gaacaaatgcacaaaaggtacctaa

SEQ ID NO: 268390 - DNA, 25 bp, Probe sequence
gactacccagctaaaataaattcta

SEQ ID NO: 268391 - DNA, 25 bp, Probe sequence
gatgaatatcttaataacaggtcaa

SEQ ID NO: 268392 - DNA, 25 bp, Probe sequence
gataatcctttcttagaagttgaga

SEQ ID NO: 268393 - DNA, 25 bp, Probe sequence
gatacctttagttaaatattcaact

SEQ ID NO: 268394 - DNA, 25 bp, Probe sequence
gtataccttttagaacaaatgcaca

SEQ ID NO: 268395 - DNA, 25 bp, Probe sequence
gtcaaaagctaaaataccacaaaat

SEQ ID NO: 268396 - DNA, 25 bp, Probe sequence
ggcgaacagcccgataaacctaatt

SEQ ID NO: 268397 - DNA, 25 bp, Probe sequence
ggaggcgaacagcccgataaaccta

SEQ ID NO: 268398 - DNA, 25 bp, Probe sequence
tcaagcaataaaaatggttcaagac

SEQ ID NO: 268399 - DNA, 25 bp, Probe sequence
taatagagtttgtataccttttaga

SEQ ID NO: 268400 - DNA, 25 bp, Probe sequence
tacaatcttctctgcctaatgaaaa

SEQ ID NO: 268401 - DNA, 25 bp, Probe sequence
tttaggaggcgaacagcccgataaa

SEQ ID NO: 268402 - DNA, 25 bp, Probe sequence
tttactttgtctgcactaactatta

SEQ ID NO: 268403 - DNA, 25 bp, Probe sequence
atattaatgacttcccagcaattcc

SEQ ID NO: 268404 - DNA, 25 bp, Probe sequence
atatgatttagaatttgcccctgta

SEQ ID NO: 268405 - DNA, 25 bp, Probe sequence
ataatgccttagctgtttatagaag

SEQ ID NO: 268406 - DNA, 25 bp, Probe sequence
atctgttattgaggattcacatatc

SEQ ID NO: 268407 - DNA, 25 bp, Probe sequence
atgacttcccagcaattccaataga

SEQ ID NO: 268408 - DNA, 25 bp, Probe sequence
atgagatttacaccccgaggaattt

SEQ ID NO: 268409 - DNA, 25 bp, Probe sequence
atgataacttaactcaagacatgga

SEQ ID NO: 268410 - DNA, 25 bp, Probe sequence
aggaatgaaacaagctaccctgccc

SEQ ID NO: 268411 - DNA, 25 bp, Probe sequence
agatataccacctaatgaaattatt

SEQ ID NO: 268412 - DNA, 25 bp, Probe sequence
agaatttgcccctgtatctaatcat

SEQ ID NO: 268413 - DNA, 25 bp, Probe sequence
acaaagagttctgaattcaaaccta

SEQ ID NO: 268414 - DNA, 25 bp, Probe sequence
aaattcccctttctatagaagatag

SEQ ID NO: 268415 - DNA, 25 bp, Probe sequence
aacgaagtgtatactcaaccagttt

SEQ ID NO: 268416 - DNA, 25 bp, Probe sequence
aaccagtttatgatttagacgattc

SEQ ID NO: 268417 - DNA, 25 bp, Probe sequence
aatgaaactaactcaatagcttttg

SEQ ID NO: 268418 - DNA, 25 bp, Probe sequence
aattacctattttgacagtgatatt

SEQ ID NO: 268419 - DNA, 25 bp, Probe sequence
cgaggaattttgaacaacaccgatt

SEQ ID NO: 268420 - DNA, 25 bp, Probe sequence
ccctgcccttacacaatattactaa

SEQ ID NO: 268421 - DNA, 25 bp, Probe sequence
gcaaattataatgccttagctgttt

SEQ ID NO: 268422 - DNA, 25 bp, Probe sequence
gaattcaaacctaatttcgtaaatg

SEQ ID NO: 268423 - DNA, 25 bp, Probe sequence
gaattttattatgtgccagcaagtg

SEQ ID NO: 268424 - DNA, 25 bp, Probe sequence
gaacaacaccgattatgaactaaat

SEQ ID NO: 268425 - DNA, 25 bp, Probe sequence
gaacaaatcatctattttagctgaa

SEQ ID NO: 268426 - DNA, 25 bp, Probe sequence
gaaaagctagtaaatgccattaaat

SEQ ID NO: 268427 - DNA, 25 bp, Probe sequence
gaggattcacatatcataacagaaa

SEQ ID NO: 268428 - DNA, 25 bp, Probe sequence
gatgacgctagaaacaatttttcaa

SEQ ID NO: 268429 - DNA, 25 bp, Probe sequence
gatgaaaaaattcccctttctatag

SEQ ID NO: 268430 - DNA, 25 bp, Probe sequence
gattggtatactaacacttttgtgg

SEQ ID NO: 268431 - DNA, 25 bp, Probe sequence
gtgaaaacttatttagatgacgcta

SEQ ID NO: 268432 - DNA, 25 bp, Probe sequence
taatcaattagcctttaacctttat

SEQ ID NO: 268433 - DNA, 25 bp, Probe sequence
taagctataaccccgaaaaacatca

SEQ ID NO: 268434 - DNA, 25 bp, Probe sequence
tatcaaacaccacatattataagta

SEQ ID NO: 268435 - DNA, 25 bp, Probe sequence
tattaatttatttgacgaacgagca

SEQ ID NO: 268436 - DNA, 25 bp, Probe sequence
ttgcccctgtatctaatcatttata

SEQ ID NO: 268437 - DNA, 25 bp, Probe sequence
attgcttcaataattcctggtctct

SEQ ID NO: 268438 - DNA, 25 bp, Probe sequence
atatcttgtccgtactctacaaaga

SEQ ID NO: 268439 - DNA, 25 bp, Probe sequence
attaacctgcaataattttggaagt

SEQ ID NO: 268440 - DNA, 25 bp, Probe sequence
atttatcatgtaacaatttcagaca

SEQ ID NO: 268441 - DNA, 25 bp, Probe sequence
atttcagacaagactgttgtttact

SEQ ID NO: 268442 - DNA, 25 bp, Probe sequence
atatatcttgtccgtactctacaaa

SEQ ID NO: 268443 - DNA, 25 bp, Probe sequence
acctgcaataattttggaagtgcta

SEQ ID NO: 268444 - DNA, 25 bp, Probe sequence
aaaagtatcattgatagcatttcta

SEQ ID NO: 268445 - DNA, 25 bp, Probe sequence
aacaatatatcttgtccgtactcta

SEQ ID NO: 268446 - DNA, 25 bp, Probe sequence
aacggcgtgtatgctagtaacacta

SEQ ID NO: 268447 - DNA, 25 bp, Probe sequence
aagaccaacaatatatcttgtccgt

SEQ ID NO: 268448 - DNA, 25 bp, Probe sequence
aatttgatacacttactaaagacca

SEQ ID NO: 268449 - DNA, 25 bp, Probe sequence
caatatatcttgtccgtactctaca

SEQ ID NO: 268450 - DNA, 25 bp, Probe sequence
cagacaagactgttgtttactttga

SEQ ID NO: 268451 - DNA, 25 bp, Probe sequence
catgtaacaatttcagacaagactg

SEQ ID NO: 268452 - DNA, 25 bp, Probe sequence
ctgggttcctaaacggcgtgtatgc

SEQ ID NO: 268453 - DNA, 25 bp, Probe sequence
cctaaacggcgtgtatgctagtaac

SEQ ID NO: 268454 - DNA, 25 bp, Probe sequence
ccaacaatatatcttgtccgtactc

SEQ ID NO: 268455 - DNA, 25 bp, Probe sequence
gaagtgctaaagatatacatacaaa

SEQ ID NO: 268456 - DNA, 25 bp, Probe sequence
gacaagactgttgtttactttgaaa

SEQ ID NO: 268457 - DNA, 25 bp, Probe sequence
gactgttgtttactttgaaaatgag

SEQ ID NO: 268458 - DNA, 25 bp, Probe sequence
gaccaacaatatatcttgtccgtac

SEQ ID NO: 268459 - DNA, 25 bp, Probe sequence
gatacacttactaaagaccaacaat

SEQ ID NO: 268460 - DNA, 25 bp, Probe sequence
gttcctaaacggcgtgtatgctagt

SEQ ID NO: 268461 - DNA, 25 bp, Probe sequence
gtatgctagtaacactatttatcat

SEQ ID NO: 268462 - DNA, 25 bp, Probe sequence
gtccgtactctacaaagattattta

SEQ ID NO: 268463 - DNA, 25 bp, Probe sequence
gggttcctaaacggcgtgtatgcta

SEQ ID NO: 268464 - DNA, 25 bp, Probe sequence
ggcgtgtatgctagtaacactattt

SEQ ID NO: 268465 - DNA, 25 bp, Probe sequence
tgcttcaataattcctggtctctag

SEQ ID NO: 268466 - DNA, 25 bp, Probe sequence
tgctagtaacactatttatcatgta

SEQ ID NO: 268467 - DNA, 25 bp, Probe sequence
tctgggttcctaaacggcgtgtatg

SEQ ID NO: 268468 - DNA, 25 bp, Probe sequence
tcttgtccgtactctacaaagatta

SEQ ID NO: 268469 - DNA, 25 bp, Probe sequence
tattttcaaaaactacatttcgaag

SEQ ID NO: 268470 - DNA, 25 bp, Probe sequence
ttgcttcaataattcctggtctcta

SEQ ID NO: 268471 - DNA, 25 bp, Probe sequence
atctaattacgttaccattaaagat

SEQ ID NO: 268472 - DNA, 25 bp, Probe sequence
atgactgtttgctacattttagatc

SEQ ID NO: 268473 - DNA, 25 bp, Probe sequence
agctacccaatgtcaaaaataaatg

SEQ ID NO: 268474 - DNA, 25 bp, Probe sequence
acgggcaaagtcgtcagattattta

SEQ ID NO: 268475 - DNA, 25 bp, Probe sequence
acattacgggcaaagtcgtcagatt

SEQ ID NO: 268476 - DNA, 25 bp, Probe sequence
aaatagcgcaagaagagttgaaaat

SEQ ID NO: 268477 - DNA, 25 bp, Probe sequence
aaagatagaagctacccaatgtcaa

SEQ ID NO: 268478 - DNA, 25 bp, Probe sequence
aaagatacacagaggcaaaaggcaa

SEQ ID NO: 268479 - DNA, 25 bp, Probe sequence
aaacaatcgatttaatgaattatgt

SEQ ID NO: 268480 - DNA, 25 bp, Probe sequence
aactcagatgacacatttaccctaa

SEQ ID NO: 268481 - DNA, 25 bp, Probe sequence
aaccaataactactataaatagcgc

SEQ ID NO: 268482 - DNA, 25 bp, Probe sequence
aagtcgtcagattatttagagattt

SEQ ID NO: 268483 - DNA, 25 bp, Probe sequence
aattatatttaactcagatgacaca

SEQ ID NO: 268484 - DNA, 25 bp, Probe sequence
cacagaggcaaaaggcaaattagtt

SEQ ID NO: 268485 - DNA, 25 bp, Probe sequence
cagatgacacatttaccctaaagcg

SEQ ID NO: 268486 - DNA, 25 bp, Probe sequence
catttaccctaaagcgattatctaa

SEQ ID NO: 268487 - DNA, 25 bp, Probe sequence
ctcagatgacacatttaccctaaag

SEQ ID NO: 268488 - DNA, 25 bp, Probe sequence
gcgattatctaattacgttaccatt

SEQ ID NO: 268489 - DNA, 25 bp, Probe sequence
gaagctacccaatgtcaaaaataaa

SEQ ID NO: 268490 - DNA, 25 bp, Probe sequence
gacacatttaccctaaagcgattat

SEQ ID NO: 268491 - DNA, 25 bp, Probe sequence
gatgacacatttaccctaaagcgat

SEQ ID NO: 268492 - DNA, 25 bp, Probe sequence
gatagaagctacccaatgtcaaaaa

SEQ ID NO: 268493 - DNA, 25 bp, Probe sequence
gatatgactgtttgctacattttag

SEQ ID NO: 268494 - DNA, 25 bp, Probe sequence
gattatctaattacgttaccattaa

SEQ ID NO: 268495 - DNA, 25 bp, Probe sequence
gttaccattaaagatagaagctacc

SEQ ID NO: 268496 - DNA, 25 bp, Probe sequence
gtaaacattacgggcaaagtcgtca

SEQ ID NO: 268497 - DNA, 25 bp, Probe sequence
gtcgtcagattatttagagatttta

SEQ ID NO: 268498 - DNA, 25 bp, Probe sequence
gggcaaagtcgtcagattatttaga

SEQ ID NO: 268499 - DNA, 25 bp, Probe sequence
ggaatttccaaaaagatacacagag

SEQ ID NO: 268500 - DNA, 25 bp, Probe sequence
tgactgtttgctacattttagatca

SEQ ID NO: 268501 - DNA, 25 bp, Probe sequence
taatgaattatgtggaatttccaaa

SEQ ID NO: 268502 - DNA, 25 bp, Probe sequence
tagaagctacccaatgtcaaaaata

SEQ ID NO: 268503 - DNA, 25 bp, Probe sequence
tttaccctaaagcgattatctaatt

SEQ ID NO: 268504 - DNA, 25 bp, Probe sequence
ttaactcagatgacacatttaccct

SEQ ID NO: 268505 - DNA, 25 bp, Probe sequence
atcggactgctactagtaagtacat

SEQ ID NO: 268506 - DNA, 25 bp, Probe sequence
aggctaaagcttttgaagagtacaa

SEQ ID NO: 268507 - DNA, 25 bp, Probe sequence
agtaccaggagccaatattaactaa

SEQ ID NO: 268508 - DNA, 25 bp, Probe sequence
agctttaacagcttgtggtgaaaaa

SEQ ID NO: 268509 - DNA, 25 bp, Probe sequence
agcgcagtaccaggagccaatatta

SEQ ID NO: 268510 - DNA, 25 bp, Probe sequence
acattagctttaacagcttgtggtg

SEQ ID NO: 268511 - DNA, 25 bp, Probe sequence
aaatgatgagtatgtcgtttcgcct

SEQ ID NO: 268512 - DNA, 25 bp, Probe sequence
aaaagtaatcggactgctactagta

SEQ ID NO: 268513 - DNA, 25 bp, Probe sequence
aagagctggtgctagcgcagtacca

SEQ ID NO: 268514 - DNA, 25 bp, Probe sequence
aatgatgagtatgtcgtttcgcctg

SEQ ID NO: 268515 - DNA, 25 bp, Probe sequence
caagagctggtgctagcgcagtacc

SEQ ID NO: 268516 - DNA, 25 bp, Probe sequence
ctagcgcagtaccaggagccaatat

SEQ ID NO: 268517 - DNA, 25 bp, Probe sequence
cgtttcgcctggctggactaaagat

SEQ ID NO: 268518 - DNA, 25 bp, Probe sequence
cgcctggctggactaaagatgaaca

SEQ ID NO: 268519 - DNA, 25 bp, Probe sequence
gcgcagtaccaggagccaatattaa

SEQ ID NO: 268520 - DNA, 25 bp, Probe sequence
gctggtgctagcgcagtaccaggag

SEQ ID NO: 268521 - DNA, 25 bp, Probe sequence
gctagcgcagtaccaggagccaata

SEQ ID NO: 268522 - DNA, 25 bp, Probe sequence
gcagtaccaggagccaatattaact

SEQ ID NO: 268523 - DNA, 25 bp, Probe sequence
gcaagagctggtgctagcgcagtac

SEQ ID NO: 268524 - DNA, 25 bp, Probe sequence
gaagcaagagctggtgctagcgcag

SEQ ID NO: 268525 - DNA, 25 bp, Probe sequence
gaacaggctaaagcttttgaagagt

SEQ ID NO: 268526 - DNA, 25 bp, Probe sequence
gagctggtgctagcgcagtaccagg

SEQ ID NO: 268527 - DNA, 25 bp, Probe sequence
gatgaacaggctaaagcttttgaag

SEQ ID NO: 268528 - DNA, 25 bp, Probe sequence
gtacattagctttaacagcttgtgg

SEQ ID NO: 268529 - DNA, 25 bp, Probe sequence
gtaatcggactgctactagtaagta

SEQ ID NO: 268530 - DNA, 25 bp, Probe sequence
ggactaaagatgaacaggctaaagc

SEQ ID NO: 268531 - DNA, 25 bp, Probe sequence
ggactgctactagtaagtacattag

SEQ ID NO: 268532 - DNA, 25 bp, Probe sequence
tggtgctagcgcagtaccaggagcc

SEQ ID NO: 268533 - DNA, 25 bp, Probe sequence
tgatgagtatgtcgtttcgcctggc

SEQ ID NO: 268534 - DNA, 25 bp, Probe sequence
tgctagcgcagtaccaggagccaat

SEQ ID NO: 268535 - DNA, 25 bp, Probe sequence
tcgtttcgcctggctggactaaaga

SEQ ID NO: 268536 - DNA, 25 bp, Probe sequence
tcgcctggctggactaaagatgaac

SEQ ID NO: 268537 - DNA, 25 bp, Probe sequence
tagtaagtacattagctttaacagc

SEQ ID NO: 268538 - DNA, 25 bp, Probe sequence
tttcgcctggctggactaaagatga

SEQ ID NO: 268539 - DNA, 25 bp, Probe sequence
atgcctagtctgttattgcctgaat

SEQ ID NO: 268540 - DNA, 25 bp, Probe sequence
atgtacgtccgatgagtgatgcaat

SEQ ID NO: 268541 - DNA, 25 bp, Probe sequence
atgttgttgctgatctactattaga

SEQ ID NO: 268542 - DNA, 25 bp, Probe sequence
aggtcatgaaagtgtggcgggcgca

SEQ ID NO: 268543 - DNA, 25 bp, Probe sequence
agcagggccctttgaaacgattggt

SEQ ID NO: 268544 - DNA, 25 bp, Probe sequence
agcaggtcatgctagtcattctcac

SEQ ID NO: 268545 - DNA, 25 bp, Probe sequence
aaccgaagcatttgcgccgttcgtt

SEQ ID NO: 268546 - DNA, 25 bp, Probe sequence
caaactgccaacgattggtcgtgtg

SEQ ID NO: 268547 - DNA, 25 bp, Probe sequence
cgatgtatcattcgccaattcgttt

SEQ ID NO: 268548 - DNA, 25 bp, Probe sequence
cccgcaacactacatcaatctttat

SEQ ID NO: 268549 - DNA, 25 bp, Probe sequence
gccgttcgttgtgttagcaggtcat

SEQ ID NO: 268550 - DNA, 25 bp, Probe sequence
gcgaatcgcgaacgtttggacaaac

SEQ ID NO: 268551 - DNA, 25 bp, Probe sequence
gaatttgcagaccgctacgatatga

SEQ ID NO: 268552 - DNA, 25 bp, Probe sequence
gaagggcggacatttttacacaatt

SEQ ID NO: 268553 - DNA, 25 bp, Probe sequence
gaaggtgtctaatcattggctgcgt

SEQ ID NO: 268554 - DNA, 25 bp, Probe sequence
gaacatcagacttacctgttggatt

SEQ ID NO: 268555 - DNA, 25 bp, Probe sequence
gaacaaggtgagccacttagcgaac

SEQ ID NO: 268556 - DNA, 25 bp, Probe sequence
gagttggacaatgccgaagcgtgag

SEQ ID NO: 268557 - DNA, 25 bp, Probe sequence
gatgtatggcttatcatggcaatct

SEQ ID NO: 268558 - DNA, 25 bp, Probe sequence
gttcgttcagaaccatttcgtagac

SEQ ID NO: 268559 - DNA, 25 bp, Probe sequence
gttgcgccgcatttttacggaagtg

SEQ ID NO: 268560 - DNA, 25 bp, Probe sequence
ttcattacctgtcatggtaccgccg

SEQ ID NO: 268561 - DNA, 25 bp, Probe sequence
gtagacatatcgaagcagcagggcc

SEQ ID NO: 268562 - DNA, 25 bp, Probe sequence
gtcacgtcaggtgttggtgtcatgc

SEQ ID NO: 268563 - DNA, 25 bp, Probe sequence
gtcattctcacaataatccacatca

SEQ ID NO: 268564 - DNA, 25 bp, Probe sequence
gtgatatgcctagcgatgtattact

SEQ ID NO: 268565 - DNA, 25 bp, Probe sequence
ggtcgtgtgaatcatccagtggaag

SEQ ID NO: 268566 - DNA, 25 bp, Probe sequence
tggcgttaccgggttgggcaggtat

SEQ ID NO: 268567 - DNA, 25 bp, Probe sequence
ggcaatctgttatggctgctgatcg

SEQ ID NO: 268568 - DNA, 25 bp, Probe sequence
tgaacatcactacaatatcccgcaa

SEQ ID NO: 268569 - DNA, 25 bp, Probe sequence
tgaaggacatcttttggcgttaccg

SEQ ID NO: 268570 - DNA, 25 bp, Probe sequence
taaagcgacacaaaccgtcacgtca

SEQ ID NO: 268571 - DNA, 25 bp, Probe sequence
taccgccggcatatcgcattaaaga

SEQ ID NO: 268572 - DNA, 25 bp, Probe sequence
tattatgcgtcgacagttgcgccgc

SEQ ID NO: 268573 - DNA, 25 bp, Probe sequence
atccaattgcagcagtaccaggcgc

SEQ ID NO: 268574 - DNA, 25 bp, Probe sequence
attgtaaccttactggtcttatggt

SEQ ID NO: 268575 - DNA, 25 bp, Probe sequence
attaattccaattgctttaggtatt

SEQ ID NO: 268576 - DNA, 25 bp, Probe sequence
atcagttgttgctatttcattaatt

SEQ ID NO: 268577 - DNA, 25 bp, Probe sequence
agaactctggtttagctgtgtcatt

SEQ ID NO: 268578 - DNA, 25 bp, Probe sequence
aaagcacctagagcagtaattattg

SEQ ID NO: 268579 - DNA, 25 bp, Probe sequence
aacagggcctattttagcaaagtat

SEQ ID NO: 268580 - DNA, 25 bp, Probe sequence
aagcaccaaatcttaactacaggat

SEQ ID NO: 268581 - DNA, 25 bp, Probe sequence
ctttctgtttctattacgacggtct

SEQ ID NO: 268582 - DNA, 25 bp, Probe sequence
ctgtgtcattagcagcattgcattt

SEQ ID NO: 268583 - DNA, 25 bp, Probe sequence
tagttggatgttgtccgggtgggac

SEQ ID NO: 268584 - DNA, 25 bp, Probe sequence
cccacaacatgttgcgacattaggt

SEQ ID NO: 268585 - DNA, 25 bp, Probe sequence
ccattcgttacacctgcgttaatat

SEQ ID NO: 268586 - DNA, 25 bp, Probe sequence
gctgttggcgtaatattagttggat

SEQ ID NO: 268587 - DNA, 25 bp, Probe sequence
gcagtaccaggcgcagtgtttagtt

SEQ ID NO: 268588 - DNA, 25 bp, Probe sequence
gcagcattgcattttaatccaattg

SEQ ID NO: 268589 - DNA, 25 bp, Probe sequence
gcaatagttgtaggtggcagtaagc

SEQ ID NO: 268590 - DNA, 25 bp, Probe sequence
gaagttggaatgcagaactctggtt

SEQ ID NO: 268591 - DNA, 25 bp, Probe sequence
gacgaggatgtgttaacaatgtttc

SEQ ID NO: 268592 - DNA, 25 bp, Probe sequence
gagtatatttgccacgaagagtttt

SEQ ID NO: 268593 - DNA, 25 bp, Probe sequence
gagtatgttgtggtcagttgttcaa

SEQ ID NO: 268594 - DNA, 25 bp, Probe sequence
gtccgggtgggacatcaagtaatgt

SEQ ID NO: 268595 - DNA, 25 bp, Probe sequence
gtagcagctgttattggatttattt

SEQ ID NO: 268596 - DNA, 25 bp, Probe sequence
gtaatgagttatttagccaaagcta

SEQ ID NO: 268597 - DNA, 25 bp, Probe sequence
gtggtcagttgttcaagttgtatta

SEQ ID NO: 268598 - DNA, 25 bp, Probe sequence
ggtattgttatgttaggtatgggat

SEQ ID NO: 268599 - DNA, 25 bp, Probe sequence
ggtatggatgttagtagcagctgtt

SEQ ID NO: 268600 - DNA, 25 bp, Probe sequence
ggcgcagtgtttagtttcattcata

SEQ ID NO: 268601 - DNA, 25 bp, Probe sequence
tggatattggttagctcgtctttta

SEQ ID NO: 268602 - DNA, 25 bp, Probe sequence
tgcaaagtcttttcatttaccacct

SEQ ID NO: 268603 - DNA, 25 bp, Probe sequence
tgcccacattagcatttataattgc

SEQ ID NO: 268604 - DNA, 25 bp, Probe sequence
tacaattcagtattatgcccacatt

SEQ ID NO: 268605 - DNA, 25 bp, Probe sequence
taccacctgatattgctgttggcgt

SEQ ID NO: 268606 - DNA, 25 bp, Probe sequence
ttacgacggtctctacgttgctagc

SEQ ID NO: 268607 - DNA, 25 bp, Probe sequence
aaacgccggtgcagttggtgttact

SEQ ID NO: 268608 - DNA, 25 bp, Probe sequence
attccagcggctgcgttagcaatgt

SEQ ID NO: 268609 - DNA, 25 bp, Probe sequence
attcctacaggattacatcatgcac

SEQ ID NO: 268610 - DNA, 25 bp, Probe sequence
attaccattagcattatcatttttt

SEQ ID NO: 268611 - DNA, 25 bp, Probe sequence
ataatggcaatgtctttgttggtat

SEQ ID NO: 268612 - DNA, 25 bp, Probe sequence
atcaccaatgaaattagcgccttta

SEQ ID NO: 268613 - DNA, 25 bp, Probe sequence
atggccactactttattcatggatt

SEQ ID NO: 268614 - DNA, 25 bp, Probe sequence
agctacattccattggacagctgga

SEQ ID NO: 268615 - DNA, 25 bp, Probe sequence
aaagataatattgctcctggtgaaa

SEQ ID NO: 268616 - DNA, 25 bp, Probe sequence
aaggtattacaggacgctatcaagc

SEQ ID NO: 268617 - DNA, 25 bp, Probe sequence
caaggtgttgtatttttcatcttat

SEQ ID NO: 268618 - DNA, 25 bp, Probe sequence
cagttgcagcatttttcgttggtgt

SEQ ID NO: 268619 - DNA, 25 bp, Probe sequence
catgatgttcggtattccagcggct

SEQ ID NO: 268620 - DNA, 25 bp, Probe sequence
gccaatcttatatgttgttcatgcg

SEQ ID NO: 268621 - DNA, 25 bp, Probe sequence
gccattttaccggctgcagcaatta

SEQ ID NO: 268622 - DNA, 25 bp, Probe sequence
gcggctgcgttagcaatgtatcata

SEQ ID NO: 268623 - DNA, 25 bp, Probe sequence
gcactgaatagtgtgttctggtttg

SEQ ID NO: 268624 - DNA, 25 bp, Probe sequence
gacagctggattttcatttagtgca

SEQ ID NO: 268625 - DNA, 25 bp, Probe sequence
gactgcattttactgtacattttta

SEQ ID NO: 268626 - DNA, 25 bp, Probe sequence
gagccgattgagtttgcatttatgt

SEQ ID NO: 268627 - DNA, 25 bp, Probe sequence
gttgttcatgcgttattaacaggat

SEQ ID NO: 268628 - DNA, 25 bp, Probe sequence
gtgttctggtttgatacgattggta

SEQ ID NO: 268629 - DNA, 25 bp, Probe sequence
ggcgttcgttaatgttaccagttgc

SEQ ID NO: 268630 - DNA, 25 bp, Probe sequence
ggtaatacgttaaatgcacttcatg

SEQ ID NO: 268631 - DNA, 25 bp, Probe sequence
ggattcttcccaatcatgatgttcg

SEQ ID NO: 268632 - DNA, 25 bp, Probe sequence
ggttcctagcgagttcagttgcagc

SEQ ID NO: 268633 - DNA, 25 bp, Probe sequence
tcttatactatgtgattttccgtgt

SEQ ID NO: 268634 - DNA, 25 bp, Probe sequence
tcatccattgatgttgcttgttcaa

SEQ ID NO: 268635 - DNA, 25 bp, Probe sequence
taccagttgccattttaccggctgc

SEQ ID NO: 268636 - DNA, 25 bp, Probe sequence
tagttccaattatgactgcatttta

SEQ ID NO: 268637 - DNA, 25 bp, Probe sequence
tattgttattcttatggccactact

SEQ ID NO: 268638 - DNA, 25 bp, Probe sequence
ttttccgtgtagtaatccaagtatt

SEQ ID NO: 268639 - DNA, 25 bp, Probe sequence
ttacggttggttcctagcgagttca

SEQ ID NO: 268640 - DNA, 25 bp, Probe sequence
ttcgttggtgttacagagccgattg

SEQ ID NO: 268641 - DNA, 25 bp, Probe sequence
atagatcaaatgcagcaagttttat

SEQ ID NO: 268642 - DNA, 25 bp, Probe sequence
atgcagcaagttttattatgatgga

SEQ ID NO: 268643 - DNA, 25 bp, Probe sequence
atgatgtatcgtgatggtcaaattg

SEQ ID NO: 268644 - DNA, 25 bp, Probe sequence
atggattacgcacatttaaatttag

SEQ ID NO: 268645 - DNA, 25 bp, Probe sequence
agatcaaatgcagcaagttttatta

SEQ ID NO: 268646 - DNA, 25 bp, Probe sequence
agcaagttttattatgatggattat

SEQ ID NO: 268647 - DNA, 25 bp, Probe sequence
acgaaacgacgatttagatgttata

SEQ ID NO: 268648 - DNA, 25 bp, Probe sequence
acgacgatttagatgttataagaga

SEQ ID NO: 268649 - DNA, 25 bp, Probe sequence
aaatgcagcaagttttattatgatg

SEQ ID NO: 268650 - DNA, 25 bp, Probe sequence
aaatgatgtatcgtgatggtcaaat

SEQ ID NO: 268651 - DNA, 25 bp, Probe sequence
aaaatagatcaaatgcagcaagttt

SEQ ID NO: 268652 - DNA, 25 bp, Probe sequence
aatgatgtatcgtgatggtcaaatt

SEQ ID NO: 268653 - DNA, 25 bp, Probe sequence
aatgcagcaagttttattatgatgg

SEQ ID NO: 268654 - DNA, 25 bp, Probe sequence
caaatgcagcaagttttattatgat

SEQ ID NO: 268655 - DNA, 25 bp, Probe sequence
cacgaaacgacgatttagatgttat

SEQ ID NO: 268656 - DNA, 25 bp, Probe sequence
cagcaagttttattatgatggatta

SEQ ID NO: 268657 - DNA, 25 bp, Probe sequence
catttttttgcacgaaacgacgatt

SEQ ID NO: 268658 - DNA, 25 bp, Probe sequence
gcagcaagttttattatgatggatt

SEQ ID NO: 268659 - DNA, 25 bp, Probe sequence
gcacgaaacgacgatttagatgtta

SEQ ID NO: 268660 - DNA, 25 bp, Probe sequence
gcaagttttattatgatggattata

SEQ ID NO: 268661 - DNA, 25 bp, Probe sequence
gaaacgacgatttagatgttataag

SEQ ID NO: 268662 - DNA, 25 bp, Probe sequence
gatcaaatgcagcaagttttattat

SEQ ID NO: 268663 - DNA, 25 bp, Probe sequence
tggattacgcacatttaaatttaga

SEQ ID NO: 268664 - DNA, 25 bp, Probe sequence
tgcacgaaacgacgatttagatgtt

SEQ ID NO: 268665 - DNA, 25 bp, Probe sequence
tgatgtatcgtgatggtcaaattga

SEQ ID NO: 268666 - DNA, 25 bp, Probe sequence
tgcagcaagttttattatgatggat

SEQ ID NO: 268667 - DNA, 25 bp, Probe sequence
tcaaatgcagcaagttttattatga

SEQ ID NO: 268668 - DNA, 25 bp, Probe sequence
tagatgttataagagatcgcgctga

SEQ ID NO: 268669 - DNA, 25 bp, Probe sequence
tttgcacgaaacgacgatttagatg

SEQ ID NO: 268670 - DNA, 25 bp, Probe sequence
ttttttgcacgaaacgacgatttag

SEQ ID NO: 268671 - DNA, 25 bp, Probe sequence
tttttgcacgaaacgacgatttaga

SEQ ID NO: 268672 - DNA, 25 bp, Probe sequence
ttttgcacgaaacgacgatttagat

SEQ ID NO: 268673 - DNA, 25 bp, Probe sequence
ttgcacgaaacgacgatttagatgt

SEQ ID NO: 268674 - DNA, 25 bp, Probe sequence
ttgatttaaatcagtactattataa

SEQ ID NO: 268675 - DNA, 25 bp, Probe sequence
atttgatcatgacggcaacaaaatg

SEQ ID NO: 268676 - DNA, 25 bp, Probe sequence
atactatctatttgatcatgacggc

SEQ ID NO: 268677 - DNA, 25 bp, Probe sequence
atctatttgatcatgacggcaacaa

SEQ ID NO: 268678 - DNA, 25 bp, Probe sequence
atgacggcaacaaaatgttttcagt

SEQ ID NO: 268679 - DNA, 25 bp, Probe sequence
atgttttcagttacaccacatttta

SEQ ID NO: 268680 - DNA, 25 bp, Probe sequence
atggatgcatttgataaatactatc

SEQ ID NO: 268681 - DNA, 25 bp, Probe sequence
actatctatttgatcatgacggcaa

SEQ ID NO: 268682 - DNA, 25 bp, Probe sequence
acaaaatgttttcagttacaccaca

SEQ ID NO: 268683 - DNA, 25 bp, Probe sequence
acaaatggagttaggacaccaaaca

SEQ ID NO: 268684 - DNA, 25 bp, Probe sequence
aaatgttttcagttacaccacattt

SEQ ID NO: 268685 - DNA, 25 bp, Probe sequence
aaaatgttttcagttacaccacatt

SEQ ID NO: 268686 - DNA, 25 bp, Probe sequence
aatgaacaaatggagttaggacacc

SEQ ID NO: 268687 - DNA, 25 bp, Probe sequence
aatgttttcagttacaccacatttt

SEQ ID NO: 268688 - DNA, 25 bp, Probe sequence
aatactatctatttgatcatgacgg

SEQ ID NO: 268689 - DNA, 25 bp, Probe sequence
caaaatgttttcagttacaccacat

SEQ ID NO: 268690 - DNA, 25 bp, Probe sequence
caacaaaatgttttcagttacacca

SEQ ID NO: 268691 - DNA, 25 bp, Probe sequence
caaatggagttaggacaccaaacaa

SEQ ID NO: 268692 - DNA, 25 bp, Probe sequence
catgacggcaacaaaatgttttcag

SEQ ID NO: 268693 - DNA, 25 bp, Probe sequence
ctatttgatcatgacggcaacaaaa

SEQ ID NO: 268694 - DNA, 25 bp, Probe sequence
ctatctatttgatcatgacggcaac

SEQ ID NO: 268695 - DNA, 25 bp, Probe sequence
gcaacaaaatgttttcagttacacc

SEQ ID NO: 268696 - DNA, 25 bp, Probe sequence
gaacaaatggagttaggacaccaaa

SEQ ID NO: 268697 - DNA, 25 bp, Probe sequence
gacggcaacaaaatgttttcagtta

SEQ ID NO: 268698 - DNA, 25 bp, Probe sequence
gatcatgacggcaacaaaatgtttt

SEQ ID NO: 268699 - DNA, 25 bp, Probe sequence
ggatgcatttgataaatactatcta

SEQ ID NO: 268700 - DNA, 25 bp, Probe sequence
tgttttcagttacaccacattttaa

SEQ ID NO: 268701 - DNA, 25 bp, Probe sequence
tctatttgatcatgacggcaacaaa

SEQ ID NO: 268702 - DNA, 25 bp, Probe sequence
tcagttacaccacattttaaagatg

SEQ ID NO: 268703 - DNA, 25 bp, Probe sequence
tactatctatttgatcatgacggca

SEQ ID NO: 268704 - DNA, 25 bp, Probe sequence
tatctatttgatcatgacggcaaca

SEQ ID NO: 268705 - DNA, 25 bp, Probe sequence
tttcagttacaccacattttaaaga

SEQ ID NO: 268706 - DNA, 25 bp, Probe sequence
ttttcagttacaccacattttaaag

SEQ ID NO: 268707 - DNA, 25 bp, Probe sequence
ttcagttacaccacattttaaagat

SEQ ID NO: 268708 - DNA, 25 bp, Probe sequence
ttgatcatgacggcaacaaaatgtt

SEQ ID NO: 268709 - DNA, 25 bp, Probe sequence
attcatgcatttacgcttcaaaatg

SEQ ID NO: 268710 - DNA, 25 bp, Probe sequence
ataaatgtaggtatccgtcaaactg

SEQ ID NO: 268711 - DNA, 25 bp, Probe sequence
atgtaggtatccgtcaaactgggcg

SEQ ID NO: 268712 - DNA, 25 bp, Probe sequence
atggttttgatccaagttctaagcc

SEQ ID NO: 268713 - DNA, 25 bp, Probe sequence
aggttctggactcggtttatatgga

SEQ ID NO: 268714 - DNA, 25 bp, Probe sequence
aaaggttctggactcggtttatatg

SEQ ID NO: 268715 - DNA, 25 bp, Probe sequence
aaatgcgttgaaatacgctgatgta

SEQ ID NO: 268716 - DNA, 25 bp, Probe sequence
aatgtaggtatccgtcaaactgggc

SEQ ID NO: 268717 - DNA, 25 bp, Probe sequence
aaggttctggactcggtttatatgg

SEQ ID NO: 268718 - DNA, 25 bp, Probe sequence
caagttctaagcctaaaggttctgg

SEQ ID NO: 268719 - DNA, 25 bp, Probe sequence
gatccaagttctaagcctaaaggtt

SEQ ID NO: 268720 - DNA, 25 bp, Probe sequence
gcgggaaatggttttgatccaagtt

SEQ ID NO: 268721 - DNA, 25 bp, Probe sequence
gcgaatgcgatttgtcacagatgtg

SEQ ID NO: 268722 - DNA, 25 bp, Probe sequence
gcgatttgtcacagatgtgaagggt

SEQ ID NO: 268723 - DNA, 25 bp, Probe sequence
gaatgcgatttgtcacagatgtgaa

SEQ ID NO: 268724 - DNA, 25 bp, Probe sequence
gaaataaatgtaggtatccgtcaaa

SEQ ID NO: 268725 - DNA, 25 bp, Probe sequence
gactcggtttatatggaatgaatga

SEQ ID NO: 268726 - DNA, 25 bp, Probe sequence
gatagtgatattgaaacggttgttt

SEQ ID NO: 268727 - DNA, 25 bp, Probe sequence
gttctggactcggtttatatggaat

SEQ ID NO: 268728 - DNA, 25 bp, Probe sequence
gttgaaatacgctgatgtaaatgaa

SEQ ID NO: 268729 - DNA, 25 bp, Probe sequence
gttctaagcctaaaggttctggact

SEQ ID NO: 268730 - DNA, 25 bp, Probe sequence
gttttgatccaagttctaagcctaa

SEQ ID NO: 268731 - DNA, 25 bp, Probe sequence
ggttttgatccaagttctaagccta

SEQ ID NO: 268732 - DNA, 25 bp, Probe sequence
ggttctggactcggtttatatggaa

SEQ ID NO: 268733 - DNA, 25 bp, Probe sequence
ggaaatggttttgatccaagttcta

SEQ ID NO: 268734 - DNA, 25 bp, Probe sequence
tgtaggtatccgtcaaactgggcgc

SEQ ID NO: 268735 - DNA, 25 bp, Probe sequence
tggactcggtttatatggaatgaat

SEQ ID NO: 268736 - DNA, 25 bp, Probe sequence
tccaagttctaagcctaaaggttct

SEQ ID NO: 268737 - DNA, 25 bp, Probe sequence
tctggactcggtttatatggaatga

SEQ ID NO: 268738 - DNA, 25 bp, Probe sequence
taagcctaaaggttctggactcggt

SEQ ID NO: 268739 - DNA, 25 bp, Probe sequence
ttgatccaagttctaagcctaaagg

SEQ ID NO: 268740 - DNA, 25 bp, Probe sequence
ttttgatccaagttctaagcctaaa

SEQ ID NO: 268741 - DNA, 25 bp, Probe sequence
ttacatgatagtgtgattcaagaaa

SEQ ID NO: 268742 - DNA, 25 bp, Probe sequence
ttcatgcatttacgcttcaaaatgt

SEQ ID NO: 268743 - DNA, 25 bp, Probe sequence
attttgcggcaatcgctttctatga

SEQ ID NO: 268744 - DNA, 25 bp, Probe sequence
ataaaatggcactatgtttcaggta

SEQ ID NO: 268745 - DNA, 25 bp, Probe sequence
atctaacaaaccatcatctccaata

SEQ ID NO: 268746 - DNA, 25 bp, Probe sequence
atgattttgcggcaatcgctttcta

SEQ ID NO: 268747 - DNA, 25 bp, Probe sequence
aaaccatcatctccaataaaatggc

SEQ ID NO: 268748 - DNA, 25 bp, Probe sequence
aaaatggcactatgtttcaggtaat

SEQ ID NO: 268749 - DNA, 25 bp, Probe sequence
aacaaaccatcatctccaataaaat

SEQ ID NO: 268750 - DNA, 25 bp, Probe sequence
aagatcgtagatttcaagagacatt

SEQ ID NO: 268751 - DNA, 25 bp, Probe sequence
aatggcactatgtttcaggtaataa

SEQ ID NO: 268752 - DNA, 25 bp, Probe sequence
aatcgctttctatgaatctaacaaa

SEQ ID NO: 268753 - DNA, 25 bp, Probe sequence
aatctaacaaaccatcatctccaat

SEQ ID NO: 268754 - DNA, 25 bp, Probe sequence
catcatctccaataaaatggcacta

SEQ ID NO: 268755 - DNA, 25 bp, Probe sequence
ctaacaaaccatcatctccaataaa

SEQ ID NO: 268756 - DNA, 25 bp, Probe sequence
cgtggattagctggaactgttatga

SEQ ID NO: 268757 - DNA, 25 bp, Probe sequence
gcggcaatcgctttctatgaatcta

SEQ ID NO: 268758 - DNA, 25 bp, Probe sequence
gcaatcgctttctatgaatctaaca

SEQ ID NO: 268759 - DNA, 25 bp, Probe sequence
gaatctaacaaaccatcatctccaa

SEQ ID NO: 268760 - DNA, 25 bp, Probe sequence
gaaaagattgactatccaattttat

SEQ ID NO: 268761 - DNA, 25 bp, Probe sequence
gagacattagataaaatacgcaaag

SEQ ID NO: 268762 - DNA, 25 bp, Probe sequence
gatcgtagatttcaagagacattag

SEQ ID NO: 268763 - DNA, 25 bp, Probe sequence
gattagctggaactgttatgaaaac

SEQ ID NO: 268764 - DNA, 25 bp, Probe sequence
gtactattatttggtcaaagagatg

SEQ ID NO: 268765 - DNA, 25 bp, Probe sequence
gtggattagctggaactgttatgaa

SEQ ID NO: 268766 - DNA, 25 bp, Probe sequence
ggttatgattttgcggcaatcgctt

SEQ ID NO: 268767 - DNA, 25 bp, Probe sequence
ggcaatcgctttctatgaatctaac

SEQ ID NO: 268768 - DNA, 25 bp, Probe sequence
ggcactatgtttcaggtaataaaaa

SEQ ID NO: 268769 - DNA, 25 bp, Probe sequence
tgattttgcggcaatcgctttctat

SEQ ID NO: 268770 - DNA, 25 bp, Probe sequence
tgcggcaatcgctttctatgaatct

SEQ ID NO: 268771 - DNA, 25 bp, Probe sequence
tcgctttctatgaatctaacaaacc

SEQ ID NO: 268772 - DNA, 25 bp, Probe sequence
tctccaataaaatggcactatgttt

SEQ ID NO: 268773 - DNA, 25 bp, Probe sequence
tctaacaaaccatcatctccaataa

SEQ ID NO: 268774 - DNA, 25 bp, Probe sequence
tatgattttgcggcaatcgctttct

SEQ ID NO: 268775 - DNA, 25 bp, Probe sequence
tttgcggcaatcgctttctatgaat

SEQ ID NO: 268776 - DNA, 25 bp, Probe sequence
ttttgcggcaatcgctttctatgaa

SEQ ID NO: 268777 - DNA, 25 bp, Probe sequence
atttatgtttagttgtctttgtcgc

SEQ ID NO: 268778 - DNA, 25 bp, Probe sequence
atgcttaatcagtttttatgggtta

SEQ ID NO: 268779 - DNA, 25 bp, Probe sequence
agttgtctttgtcgcaggtcatatt

SEQ ID NO: 268780 - DNA, 25 bp, Probe sequence
agcgagacgtgttactacgaaaagt

SEQ ID NO: 268781 - DNA, 25 bp, Probe sequence
aacagcgagacgtgttactacgaaa

SEQ ID NO: 268782 - DNA, 25 bp, Probe sequence
aatcgcagatatattatttaccgta

SEQ ID NO: 268783 - DNA, 25 bp, Probe sequence
caggtcatattgcacgttatcgtta

SEQ ID NO: 268784 - DNA, 25 bp, Probe sequence
catgtttggagtgtacctttgacat

SEQ ID NO: 268785 - DNA, 25 bp, Probe sequence
catattgcacgttatcgttatgata

SEQ ID NO: 268786 - DNA, 25 bp, Probe sequence
cattatcaatttggtttagacaatt

SEQ ID NO: 268787 - DNA, 25 bp, Probe sequence
ctttgtcgcaggtcatattgcacgt

SEQ ID NO: 268788 - DNA, 25 bp, Probe sequence
cgcaggtcatattgcacgttatcgt

SEQ ID NO: 268789 - DNA, 25 bp, Probe sequence
gcagatatattatttaccgtaagaa

SEQ ID NO: 268790 - DNA, 25 bp, Probe sequence
gacgtgttactacgaaaagtattcg

SEQ ID NO: 268791 - DNA, 25 bp, Probe sequence
gtttagttgtctttgtcgcaggtca

SEQ ID NO: 268792 - DNA, 25 bp, Probe sequence
gttgtctttgtcgcaggtcatattg

SEQ ID NO: 268793 - DNA, 25 bp, Probe sequence
gttatatttccgtatttatgtttag

SEQ ID NO: 268794 - DNA, 25 bp, Probe sequence
gtttcactattatggcttgttggcc

SEQ ID NO: 268795 - DNA, 25 bp, Probe sequence
gtttggagtgtacctttgacatata

SEQ ID NO: 268796 - DNA, 25 bp, Probe sequence
gtacctttgacatatataaatcgca

SEQ ID NO: 268797 - DNA, 25 bp, Probe sequence
gtctttgtcgcaggtcatattgcac

SEQ ID NO: 268798 - DNA, 25 bp, Probe sequence
gtcgcaggtcatattgcacgttatc

SEQ ID NO: 268799 - DNA, 25 bp, Probe sequence
gggatgtttttattaacagcgagac

SEQ ID NO: 268800 - DNA, 25 bp, Probe sequence
ggtcatattgcacgttatcgttatg

SEQ ID NO: 268801 - DNA, 25 bp, Probe sequence
ggagtgtacctttgacatatataaa

SEQ ID NO: 268802 - DNA, 25 bp, Probe sequence
tccgtatttatgtttagttgtcttt

SEQ ID NO: 268803 - DNA, 25 bp, Probe sequence
tcagtttttatgggttatatttccg

SEQ ID NO: 268804 - DNA, 25 bp, Probe sequence
tcactattatggcttgttggccatt

SEQ ID NO: 268805 - DNA, 25 bp, Probe sequence
tatgtttagttgtctttgtcgcagg

SEQ ID NO: 268806 - DNA, 25 bp, Probe sequence
taggtttcactattatggcttgttg

SEQ ID NO: 268807 - DNA, 25 bp, Probe sequence
tatttccgtatttatgtttagttgt

SEQ ID NO: 268808 - DNA, 25 bp, Probe sequence
tttggtttagacaattatttatgtt

SEQ ID NO: 268809 - DNA, 25 bp, Probe sequence
ttagttgtctttgtcgcaggtcata

SEQ ID NO: 268810 - DNA, 25 bp, Probe sequence
ttgtcgcaggtcatattgcacgtta

SEQ ID NO: 268811 - DNA, 25 bp, Probe sequence
attggtattcggtagatgatattga

SEQ ID NO: 268812 - DNA, 25 bp, Probe sequence
atcatttattgatatggcttataca

SEQ ID NO: 268813 - DNA, 25 bp, Probe sequence
atcattcggatatagtcattgaaga

SEQ ID NO: 268814 - DNA, 25 bp, Probe sequence
atgaacttatatgatatcatcgatg

SEQ ID NO: 268815 - DNA, 25 bp, Probe sequence
agaagtgtttgaagacgaagaagac

SEQ ID NO: 268816 - DNA, 25 bp, Probe sequence
acgtgattggtattcggtagatgat

SEQ ID NO: 268817 - DNA, 25 bp, Probe sequence
aaaaattcgatattctggatgcaga

SEQ ID NO: 268818 - DNA, 25 bp, Probe sequence
aatcgcaccaactattcaaaaattc

SEQ ID NO: 268819 - DNA, 25 bp, Probe sequence
cgcaccaactattcaaaaattcgat

SEQ ID NO: 268820 - DNA, 25 bp, Probe sequence
gaagacgaagaagacttcaacgatt

SEQ ID NO: 268821 - DNA, 25 bp, Probe sequence
gaagagaaaatcgcaccaactattc

SEQ ID NO: 268822 - DNA, 25 bp, Probe sequence
gaagatgaagatgaactagacgaag

SEQ ID NO: 268823 - DNA, 25 bp, Probe sequence
gaagaactaaatgatccagaagatg

SEQ ID NO: 268824 - DNA, 25 bp, Probe sequence
gaagaagaaatcaatcattcggata

SEQ ID NO: 268825 - DNA, 25 bp, Probe sequence
gaaaatcgcaccaactattcaaaaa

SEQ ID NO: 268826 - DNA, 25 bp, Probe sequence
gaaatcaatcattcggatatagtca

SEQ ID NO: 268827 - DNA, 25 bp, Probe sequence
gacgacgatgatattccagctcaaa

SEQ ID NO: 268828 - DNA, 25 bp, Probe sequence
gacgatgatattccagctcaaacag

SEQ ID NO: 268829 - DNA, 25 bp, Probe sequence
gagaaaatcgcaccaactattcaaa

SEQ ID NO: 268830 - DNA, 25 bp, Probe sequence
gatgacgacgatgatattccagctc

SEQ ID NO: 268831 - DNA, 25 bp, Probe sequence
gatgatattccagctcaaacagatg

SEQ ID NO: 268832 - DNA, 25 bp, Probe sequence
gatccagaagatgagcaggttgaag

SEQ ID NO: 268833 - DNA, 25 bp, Probe sequence
gatcaaaacttaaaattattgggcg

SEQ ID NO: 268834 - DNA, 25 bp, Probe sequence
gatattccagctcaaacagatgatc

SEQ ID NO: 268835 - DNA, 25 bp, Probe sequence
gatttaaacacagatggtcgttttt

SEQ ID NO: 268836 - DNA, 25 bp, Probe sequence
gattacgtgattggtattcggtaga

SEQ ID NO: 268837 - DNA, 25 bp, Probe sequence
gttaggtgattatgagtacgaagaa

SEQ ID NO: 268838 - DNA, 25 bp, Probe sequence
ggggattacgtgattggtattcggt

SEQ ID NO: 268839 - DNA, 25 bp, Probe sequence
ggagaaaatttatggggattacgtg

SEQ ID NO: 268840 - DNA, 25 bp, Probe sequence
ggcgaagatgaaatggatgacgacg

SEQ ID NO: 268841 - DNA, 25 bp, Probe sequence
tcgatattctggatgcagatgatga

SEQ ID NO: 268842 - DNA, 25 bp, Probe sequence
ttagagcgttaggtgattatgagta

SEQ ID NO: 268843 - DNA, 25 bp, Probe sequence
ttccagctcaaacagatgatcaaga

SEQ ID NO: 268844 - DNA, 25 bp, Probe sequence
ttgatatggcttatacattattgaa

SEQ ID NO: 268845 - DNA, 25 bp, Probe sequence
aggcacacgaagagttacaaatatg

SEQ ID NO: 268846 - DNA, 25 bp, Probe sequence
accattttaaaattgtaccattgct

SEQ ID NO: 268847 - DNA, 25 bp, Probe sequence
acatcactatgatattgcgttttta

SEQ ID NO: 268848 - DNA, 25 bp, Probe sequence
acaacgtatttgtgacgcattagca

SEQ ID NO: 268849 - DNA, 25 bp, Probe sequence
aaaaattgattgtcgtaccattatt

SEQ ID NO: 268850 - DNA, 25 bp, Probe sequence
aaaattgtaccattgctaatcttta

SEQ ID NO: 268851 - DNA, 25 bp, Probe sequence
catggcatgaggcacggacgacaga

SEQ ID NO: 268852 - DNA, 25 bp, Probe sequence
caagcgttagaagcatttatttctg

SEQ ID NO: 268853 - DNA, 25 bp, Probe sequence
cacatggcatgaggcacggacgaca

SEQ ID NO: 268854 - DNA, 25 bp, Probe sequence
cacatcctttaatgagacgattaat

SEQ ID NO: 268855 - DNA, 25 bp, Probe sequence
gctaatctttagtgcaatgcattat

SEQ ID NO: 268856 - DNA, 25 bp, Probe sequence
gcatctcgaaacggtatcaaaaatt

SEQ ID NO: 268857 - DNA, 25 bp, Probe sequence
gcatcaggatttagagacggtaatg

SEQ ID NO: 268858 - DNA, 25 bp, Probe sequence
gcacggacgacagaatcaagcgtta

SEQ ID NO: 268859 - DNA, 25 bp, Probe sequence
gaagcatttatttctgaattagtaa

SEQ ID NO: 268860 - DNA, 25 bp, Probe sequence
gaaagcatctcgaaacggtatcaaa

SEQ ID NO: 268861 - DNA, 25 bp, Probe sequence
gagacggtaatgacgacgttgattc

SEQ ID NO: 268862 - DNA, 25 bp, Probe sequence
gagacgattaattgaacaacgtatt

SEQ ID NO: 268863 - DNA, 25 bp, Probe sequence
gagttatggttgttgcacacggcaa

SEQ ID NO: 268864 - DNA, 25 bp, Probe sequence
gaggcacggacgacagaatcaagcg

SEQ ID NO: 268865 - DNA, 25 bp, Probe sequence
gatatacatcactatgatattgcgt

SEQ ID NO: 268866 - DNA, 25 bp, Probe sequence
gattcaaagtggggttgaccatttt

SEQ ID NO: 268867 - DNA, 25 bp, Probe sequence
gttggagttatggttgttgcacacg

SEQ ID NO: 268868 - DNA, 25 bp, Probe sequence
gtatttgtgacgcattagcaggtga

SEQ ID NO: 268869 - DNA, 25 bp, Probe sequence
ggcatgaggcacggacgacagaatc

SEQ ID NO: 268870 - DNA, 25 bp, Probe sequence
tggagagattagttttacacatgat

SEQ ID NO: 268871 - DNA, 25 bp, Probe sequence
tgtaccattgctaatctttagtgca

SEQ ID NO: 268872 - DNA, 25 bp, Probe sequence
tgattgtcgtaccattatttttata

SEQ ID NO: 268873 - DNA, 25 bp, Probe sequence
tgatattgcgtttttagaaagtgag

SEQ ID NO: 268874 - DNA, 25 bp, Probe sequence
tacacatgatttagaaagcatctcg

SEQ ID NO: 268875 - DNA, 25 bp, Probe sequence
tatggttgttgcacacggcaatatt

SEQ ID NO: 268876 - DNA, 25 bp, Probe sequence
ttactaaggcacacgaagagttaca

SEQ ID NO: 268877 - DNA, 25 bp, Probe sequence
ttcgacccaattttaaagcaaatca

SEQ ID NO: 268878 - DNA, 25 bp, Probe sequence
ttgcacacggcaatattaatggaaa

SEQ ID NO: 268879 - DNA, 25 bp, Probe sequence
attgtcgtacctttatttttatatg

SEQ ID NO: 268880 - DNA, 25 bp, Probe sequence
agtcttaatgactccaatgaaaaca

SEQ ID NO: 268881 - DNA, 25 bp, Probe sequence
agtgccatgcactatctcaaggata

SEQ ID NO: 268882 - DNA, 25 bp, Probe sequence
acatttgcagattaataaacctact

SEQ ID NO: 268883 - DNA, 25 bp, Probe sequence
acaagtcggtgttgtcgttgttgcg

SEQ ID NO: 268884 - DNA, 25 bp, Probe sequence
acatcattaccatattgcattttta

SEQ ID NO: 268885 - DNA, 25 bp, Probe sequence
acatcctttaatgacagaaataatc

SEQ ID NO: 268886 - DNA, 25 bp, Probe sequence
aaaagcacatgaagagttacagaca

SEQ ID NO: 268887 - DNA, 25 bp, Probe sequence
aagatgacatacatcattaccatat

SEQ ID NO: 268888 - DNA, 25 bp, Probe sequence
aagattgtacctttgcttctcttta

SEQ ID NO: 268889 - DNA, 25 bp, Probe sequence
aagtggcgttaaacagcttaagatt

SEQ ID NO: 268890 - DNA, 25 bp, Probe sequence
aatggcaagtttacaaaagcacatg

SEQ ID NO: 268891 - DNA, 25 bp, Probe sequence
caagcgttagaagcgtttatatctg

SEQ ID NO: 268892 - DNA, 25 bp, Probe sequence
ctttgcttctctttagtgccatgca

SEQ ID NO: 268893 - DNA, 25 bp, Probe sequence
gcgcggtcggcagaatcaagcgtta

SEQ ID NO: 268894 - DNA, 25 bp, Probe sequence
gcgcatggcaacattaatggcaagt

SEQ ID NO: 268895 - DNA, 25 bp, Probe sequence
gcgtggatgaaatgcaacaagtcgg

SEQ ID NO: 268896 - DNA, 25 bp, Probe sequence
gcttaagattgtacctttgcttctc

SEQ ID NO: 268897 - DNA, 25 bp, Probe sequence
gcaacgtattgatgaggtgcgcgtg

SEQ ID NO: 268898 - DNA, 25 bp, Probe sequence
gaagatattgcgagacagtatcaaa

SEQ ID NO: 268899 - DNA, 25 bp, Probe sequence
gaagcgtttatatctgaattagtaa

SEQ ID NO: 268900 - DNA, 25 bp, Probe sequence
gaaacagtaatgacaacgttgattc

SEQ ID NO: 268901 - DNA, 25 bp, Probe sequence
gacatgcgttcaacatttgcagatt

SEQ ID NO: 268902 - DNA, 25 bp, Probe sequence
gacagaaataatcatgcaacgtatt

SEQ ID NO: 268903 - DNA, 25 bp, Probe sequence
gagttacagacatgcgttcaacatt

SEQ ID NO: 268904 - DNA, 25 bp, Probe sequence
gaggcgcggtcggcagaatcaagcg

SEQ ID NO: 268905 - DNA, 25 bp, Probe sequence
gatgaggtgcgcgtggatgaaatgc

SEQ ID NO: 268906 - DNA, 25 bp, Probe sequence
gttgattcaaagtggcgttaaacag

SEQ ID NO: 268907 - DNA, 25 bp, Probe sequence
gtattgatgaggtgcgcgtggatga

SEQ ID NO: 268908 - DNA, 25 bp, Probe sequence
tggtgagattagttttatacatgat

SEQ ID NO: 268909 - DNA, 25 bp, Probe sequence
tgttgtcgttgttgcgcatggcaac

SEQ ID NO: 268910 - DNA, 25 bp, Probe sequence
taaacctacttatgcgagaacgcta

SEQ ID NO: 268911 - DNA, 25 bp, Probe sequence
tatatgacggaagacttgttaacaa

SEQ ID NO: 268912 - DNA, 25 bp, Probe sequence
ttgcttctctttagtgccatgcact

SEQ ID NO: 268913 - DNA, 25 bp, Probe sequence
atgttgaagtcatcaaaggtattga

SEQ ID NO: 268914 - DNA, 25 bp, Probe sequence
agtgatgttgtttgatgaaccaaca

SEQ ID NO: 268915 - DNA, 25 bp, Probe sequence
acggcaaaacatatacatctaaaga

SEQ ID NO: 268916 - DNA, 25 bp, Probe sequence
aaagtgatgttgtttgatgaaccaa

SEQ ID NO: 268917 - DNA, 25 bp, Probe sequence
aacggcaaaacatatacatctaaag

SEQ ID NO: 268918 - DNA, 25 bp, Probe sequence
aagtgatgttgtttgatgaaccaac

SEQ ID NO: 268919 - DNA, 25 bp, Probe sequence
aatcacaaatagaagttcgtaaaca

SEQ ID NO: 268920 - DNA, 25 bp, Probe sequence
catgacaatggtcattgtgacacat

SEQ ID NO: 268921 - DNA, 25 bp, Probe sequence
ctttttccgcataagacggcattag

SEQ ID NO: 268922 - DNA, 25 bp, Probe sequence
ctaaagtgatgttgtttgatgaacc

SEQ ID NO: 268923 - DNA, 25 bp, Probe sequence
cggcaaaacatatacatctaaagat

SEQ ID NO: 268924 - DNA, 25 bp, Probe sequence
cgcataagacggcattagaaaatgt

SEQ ID NO: 268925 - DNA, 25 bp, Probe sequence
ccgcataagacggcattagaaaatg

SEQ ID NO: 268926 - DNA, 25 bp, Probe sequence
cctaaagtgatgttgtttgatgaac

SEQ ID NO: 268927 - DNA, 25 bp, Probe sequence
gcataagacggcattagaaaatgta

SEQ ID NO: 268928 - DNA, 25 bp, Probe sequence
gcatgacaatggtcattgtgacaca

SEQ ID NO: 268929 - DNA, 25 bp, Probe sequence
gcaaaacatatacatctaaagataa

SEQ ID NO: 268930 - DNA, 25 bp, Probe sequence
gatgttgaagtcatcaaaggtattg

SEQ ID NO: 268931 - DNA, 25 bp, Probe sequence
gttaacggcaaaacatatacatcta

SEQ ID NO: 268932 - DNA, 25 bp, Probe sequence
gtgatgttgtttgatgaaccaacat

SEQ ID NO: 268933 - DNA, 25 bp, Probe sequence
ggcatgacaatggtcattgtgacac

SEQ ID NO: 268934 - DNA, 25 bp, Probe sequence
ggcaaaacatatacatctaaagata

SEQ ID NO: 268935 - DNA, 25 bp, Probe sequence
tgatgttgtttgatgaaccaacatc

SEQ ID NO: 268936 - DNA, 25 bp, Probe sequence
tccgcataagacggcattagaaaat

SEQ ID NO: 268937 - DNA, 25 bp, Probe sequence
taacggcaaaacatatacatctaaa

SEQ ID NO: 268938 - DNA, 25 bp, Probe sequence
taaagtgatgttgtttgatgaacca

SEQ ID NO: 268939 - DNA, 25 bp, Probe sequence
tagaaaatgtaatggaaggtcttat

SEQ ID NO: 268940 - DNA, 25 bp, Probe sequence
tagaaattccaactgaaggtacagt

SEQ ID NO: 268941 - DNA, 25 bp, Probe sequence
tttccgcataagacggcattagaaa

SEQ ID NO: 268942 - DNA, 25 bp, Probe sequence
tttttccgcataagacggcattaga

SEQ ID NO: 268943 - DNA, 25 bp, Probe sequence
ttttccgcataagacggcattagaa

SEQ ID NO: 268944 - DNA, 25 bp, Probe sequence
ttccgcataagacggcattagaaaa

SEQ ID NO: 268945 - DNA, 25 bp, Probe sequence
ttagaaattccaactgaaggtacag

SEQ ID NO: 268946 - DNA, 25 bp, Probe sequence
ttaacggcaaaacatatacatctaa

SEQ ID NO: 268947 - DNA, 25 bp, Probe sequence
attatctgcaattcaacaagcacat

SEQ ID NO: 268948 - DNA, 25 bp, Probe sequence
atttataaatggcatatcgatattc

SEQ ID NO: 268949 - DNA, 25 bp, Probe sequence
atatggggatgacttacaatatcgt

SEQ ID NO: 268950 - DNA, 25 bp, Probe sequence
atacgtacatcaatcagaagatgat

SEQ ID NO: 268951 - DNA, 25 bp, Probe sequence
ataaatggcatatcgatattcaagc

SEQ ID NO: 268952 - DNA, 25 bp, Probe sequence
atcagaagatgatatcgttacgtca

SEQ ID NO: 268953 - DNA, 25 bp, Probe sequence
atggggatgacttacaatatcgtca

SEQ ID NO: 268954 - DNA, 25 bp, Probe sequence
agaagatgatatcgttacgtcatct

SEQ ID NO: 268955 - DNA, 25 bp, Probe sequence
agcacatcaacaatttactggtgtt

SEQ ID NO: 268956 - DNA, 25 bp, Probe sequence
agctggcatttataaatggcatatc

SEQ ID NO: 268957 - DNA, 25 bp, Probe sequence
acatacgtacatcaatcagaagatg

SEQ ID NO: 268958 - DNA, 25 bp, Probe sequence
aaagatatggggatgacttacaata

SEQ ID NO: 268959 - DNA, 25 bp, Probe sequence
aacatacgtacatcaatcagaagat

SEQ ID NO: 268960 - DNA, 25 bp, Probe sequence
aagctggcatttataaatggcatat

SEQ ID NO: 268961 - DNA, 25 bp, Probe sequence
aagcacatcaacaatttactggtgt

SEQ ID NO: 268962 - DNA, 25 bp, Probe sequence
aagatatggggatgacttacaatat

SEQ ID NO: 268963 - DNA, 25 bp, Probe sequence
aagatgatatcgttacgtcatctgt

SEQ ID NO: 268964 - DNA, 25 bp, Probe sequence
caagcacatcaacaatttactggtg

SEQ ID NO: 268965 - DNA, 25 bp, Probe sequence
caacatacgtacatcaatcagaaga

SEQ ID NO: 268966 - DNA, 25 bp, Probe sequence
cacatcaacaatttactggtgttga

SEQ ID NO: 268967 - DNA, 25 bp, Probe sequence
cagaagatgatatcgttacgtcatc

SEQ ID NO: 268968 - DNA, 25 bp, Probe sequence
catacgtacatcaatcagaagatga

SEQ ID NO: 268969 - DNA, 25 bp, Probe sequence
gctggcatttataaatggcatatcg

SEQ ID NO: 268970 - DNA, 25 bp, Probe sequence
gcttttaaagatatggggatgactt

SEQ ID NO: 268971 - DNA, 25 bp, Probe sequence
gcatttataaatggcatatcgatat

SEQ ID NO: 268972 - DNA, 25 bp, Probe sequence
gcacatcaacaatttactggtgttg

SEQ ID NO: 268973 - DNA, 25 bp, Probe sequence
gcaacatacgtacatcaatcagaag

SEQ ID NO: 268974 - DNA, 25 bp, Probe sequence
gaagatgatatcgttacgtcatctg

SEQ ID NO: 268975 - DNA, 25 bp, Probe sequence
ggcatttataaatggcatatcgata

SEQ ID NO: 268976 - DNA, 25 bp, Probe sequence
tggggatgacttacaatatcgtcaa

SEQ ID NO: 268977 - DNA, 25 bp, Probe sequence
tcagaagatgatatcgttacgtcat

SEQ ID NO: 268978 - DNA, 25 bp, Probe sequence
tatggggatgacttacaatatcgtc

SEQ ID NO: 268979 - DNA, 25 bp, Probe sequence
ttataaatggcatatcgatattcaa

SEQ ID NO: 268980 - DNA, 25 bp, Probe sequence
ttatctgcaattcaacaagcacatc

SEQ ID NO: 268981 - DNA, 25 bp, Probe sequence
attttaggctgattcatcgtttatt

SEQ ID NO: 268982 - DNA, 25 bp, Probe sequence
atagtagatgagattgatcgcctta

SEQ ID NO: 268983 - DNA, 25 bp, Probe sequence
atgaggcaataacgacgattattaa

SEQ ID NO: 268984 - DNA, 25 bp, Probe sequence
atgatgaacataatttagcaatgat

SEQ ID NO: 268985 - DNA, 25 bp, Probe sequence
actatctcgttatcctcaactatat

SEQ ID NO: 268986 - DNA, 25 bp, Probe sequence
aaactatctcgttatcctcaactat

SEQ ID NO: 268987 - DNA, 25 bp, Probe sequence
aaaaactatctcgttatcctcaact

SEQ ID NO: 268988 - DNA, 25 bp, Probe sequence
aactatattcgcgtataggttttgc

SEQ ID NO: 268989 - DNA, 25 bp, Probe sequence
gccttaaagtgcaacatttagagca

SEQ ID NO: 268990 - DNA, 25 bp, Probe sequence
gctgattcatcgtttatttgcgcag

SEQ ID NO: 268991 - DNA, 25 bp, Probe sequence
gaagttgtagaaacagctagagata

SEQ ID NO: 268992 - DNA, 25 bp, Probe sequence
gagcaattaagagctatttatgatg

SEQ ID NO: 268993 - DNA, 25 bp, Probe sequence
gagaaaaaactatctcgttatcctc

SEQ ID NO: 268994 - DNA, 25 bp, Probe sequence
gagacgcatcatatattagaatata

SEQ ID NO: 268995 - DNA, 25 bp, Probe sequence
gagattgatcgccttaaagtgcaac

SEQ ID NO: 268996 - DNA, 25 bp, Probe sequence
gatgagattgatcgccttaaagtgc

SEQ ID NO: 268997 - DNA, 25 bp, Probe sequence
gatcgccttaaagtgcaacatttag

SEQ ID NO: 268998 - DNA, 25 bp, Probe sequence
gattcatcgtttatttgcgcagata

SEQ ID NO: 268999 - DNA, 25 bp, Probe sequence
gattgatcgccttaaagtgcaacat

SEQ ID NO: 269000 - DNA, 25 bp, Probe sequence
gttatcctcaactatattcgcgtat

SEQ ID NO: 269001 - DNA, 25 bp, Probe sequence
gggaattttaggctgattcatcgtt

SEQ ID NO: 269002 - DNA, 25 bp, Probe sequence
ggctgattcatcgtttatttgcgca

SEQ ID NO: 269003 - DNA, 25 bp, Probe sequence
tgcaacatttagagcaattaagagc

SEQ ID NO: 269004 - DNA, 25 bp, Probe sequence
tcctcaactatattcgcgtataggt

SEQ ID NO: 269005 - DNA, 25 bp, Probe sequence
tcgttatcctcaactatattcgcgt

SEQ ID NO: 269006 - DNA, 25 bp, Probe sequence
tctcgttatcctcaactatattcgc

SEQ ID NO: 269007 - DNA, 25 bp, Probe sequence
actgattatgaggcaataacgacga

SEQ ID NO: 269008 - DNA, 25 bp, Probe sequence
tagcaatgatatttattggtatgcc

SEQ ID NO: 269009 - DNA, 25 bp, Probe sequence
taggctgattcatcgtttatttgcg

SEQ ID NO: 269010 - DNA, 25 bp, Probe sequence
tatctcgttatcctcaactatattc

SEQ ID NO: 269011 - DNA, 25 bp, Probe sequence
ttatcctcaactatattcgcgtata

SEQ ID NO: 269012 - DNA, 25 bp, Probe sequence
ttaagagctatttatgatgaacata

SEQ ID NO: 269013 - DNA, 25 bp, Probe sequence
ttcatcgtttatttgcgcagataga

SEQ ID NO: 269014 - DNA, 25 bp, Probe sequence
ttgatcgccttaaagtgcaacattt

SEQ ID NO: 269015 - DNA, 25 bp, Probe sequence
attaaacgccttgcactcaagaata

SEQ ID NO: 269016 - DNA, 25 bp, Probe sequence
atagacgagattaaacgccttgcac

SEQ ID NO: 269017 - DNA, 25 bp, Probe sequence
atcaagcatttctaaaagcaaaggt

SEQ ID NO: 269018 - DNA, 25 bp, Probe sequence
aggaacaaggtcttactggtctaat

SEQ ID NO: 269019 - DNA, 25 bp, Probe sequence
aggtcttactggtctaattcataat

SEQ ID NO: 269020 - DNA, 25 bp, Probe sequence
aggtattgcgttaagtacactttat

SEQ ID NO: 269021 - DNA, 25 bp, Probe sequence
agtcgctattgatttgaaaattaac

SEQ ID NO: 269022 - DNA, 25 bp, Probe sequence
agagttgataaaggtgagcataaat

SEQ ID NO: 269023 - DNA, 25 bp, Probe sequence
actggtctaattcataatacaagag

SEQ ID NO: 269024 - DNA, 25 bp, Probe sequence
acaaggtcttactggtctaattcat

SEQ ID NO: 269025 - DNA, 25 bp, Probe sequence
aacgccttgcactcaagaataaaag

SEQ ID NO: 269026 - DNA, 25 bp, Probe sequence
aaccttttatcttgggcaagcaatc

SEQ ID NO: 269027 - DNA, 25 bp, Probe sequence
aagcaatctttatcaagcatttcta

SEQ ID NO: 269028 - DNA, 25 bp, Probe sequence
aataagagaatcctcaagacccaat

SEQ ID NO: 269029 - DNA, 25 bp, Probe sequence
caggctactttataagttttgatgc

SEQ ID NO: 269030 - DNA, 25 bp, Probe sequence
gcaaaggtattgcgttaagtacact

SEQ ID NO: 269031 - DNA, 25 bp, Probe sequence
gcaattgcaggctactttataagtt

SEQ ID NO: 269032 - DNA, 25 bp, Probe sequence
gaacaaggtcttactggtctaattc

SEQ ID NO: 269033 - DNA, 25 bp, Probe sequence
gaaatagtattgctacgattcatag

SEQ ID NO: 269034 - DNA, 25 bp, Probe sequence
gacgagattaaacgccttgcactca

SEQ ID NO: 269035 - DNA, 25 bp, Probe sequence
gagattaaacgccttgcactcaaga

SEQ ID NO: 269036 - DNA, 25 bp, Probe sequence
gatttctctcaccaaggtgaaaaat

SEQ ID NO: 269037 - DNA, 25 bp, Probe sequence
gttaagtacactttataggtggaat

SEQ ID NO: 269038 - DNA, 25 bp, Probe sequence
gtattgctacgattcataggaaaat

SEQ ID NO: 269039 - DNA, 25 bp, Probe sequence
gtcttactggtctaattcataatac

SEQ ID NO: 269040 - DNA, 25 bp, Probe sequence
ggtatacccgaaaaattctacacag

SEQ ID NO: 269041 - DNA, 25 bp, Probe sequence
ggaaaatcgctaattattgtataga

SEQ ID NO: 269042 - DNA, 25 bp, Probe sequence
tgtggtatacccgaaaaattctaca

SEQ ID NO: 269043 - DNA, 25 bp, Probe sequence
taaaaccttttatcttgggcaagca

SEQ ID NO: 269044 - DNA, 25 bp, Probe sequence
taagagaatcctcaagacccaatga

SEQ ID NO: 269045 - DNA, 25 bp, Probe sequence
tacccgaaaaattctacacagatca

SEQ ID NO: 269046 - DNA, 25 bp, Probe sequence
tagtattattaaagcaatgcctaag

SEQ ID NO: 269047 - DNA, 25 bp, Probe sequence
tattgatttctctcaccaaggtgaa

SEQ ID NO: 269048 - DNA, 25 bp, Probe sequence
tttatcttgggcaagcaatctttat

SEQ ID NO: 269049 - DNA, 25 bp, Probe sequence
attacatcattacgacagaacaaga

SEQ ID NO: 269050 - DNA, 25 bp, Probe sequence
atggcagtatgaaacgctatgaagc

SEQ ID NO: 269051 - DNA, 25 bp, Probe sequence
agagtaatcaattcattagtatatg

SEQ ID NO: 269052 - DNA, 25 bp, Probe sequence
acctagtgaacgtggttattacatc

SEQ ID NO: 269053 - DNA, 25 bp, Probe sequence
acgctatgaagctttgaaacgaatt

SEQ ID NO: 269054 - DNA, 25 bp, Probe sequence
acgtggttattacatcattacgaca

SEQ ID NO: 269055 - DNA, 25 bp, Probe sequence
aacgtggttattacatcattacgac

SEQ ID NO: 269056 - DNA, 25 bp, Probe sequence
aagcaacaagcgatgagaagtatta

SEQ ID NO: 269057 - DNA, 25 bp, Probe sequence
ctgatggcagtatgaaacgctatga

SEQ ID NO: 269058 - DNA, 25 bp, Probe sequence
gctgatggcagtatgaaacgctatg

SEQ ID NO: 269059 - DNA, 25 bp, Probe sequence
gcagttataaacctagtgaacgtgg

SEQ ID NO: 269060 - DNA, 25 bp, Probe sequence
gcaacaagcgatgagaagtattaag

SEQ ID NO: 269061 - DNA, 25 bp, Probe sequence
gcaatgaacgatggttacgaagagt

SEQ ID NO: 269062 - DNA, 25 bp, Probe sequence
gaacgatggttacgaagagtaatca

SEQ ID NO: 269063 - DNA, 25 bp, Probe sequence
gaacgtggttattacatcattacga

SEQ ID NO: 269064 - DNA, 25 bp, Probe sequence
gaaaagcaacaagcgatgagaagta

SEQ ID NO: 269065 - DNA, 25 bp, Probe sequence
gaaacgctatgaagctttgaaacga

SEQ ID NO: 269066 - DNA, 25 bp, Probe sequence
gacagaacaagaaaagcaacaagcg

SEQ ID NO: 269067 - DNA, 25 bp, Probe sequence
gatggcagtatgaaacgctatgaag

SEQ ID NO: 269068 - DNA, 25 bp, Probe sequence
gtattaagaaattagctgatggcag

SEQ ID NO: 269069 - DNA, 25 bp, Probe sequence
gtatgaaacgctatgaagctttgaa

SEQ ID NO: 269070 - DNA, 25 bp, Probe sequence
gtgaacgtggttattacatcattac

SEQ ID NO: 269071 - DNA, 25 bp, Probe sequence
gtggttattacatcattacgacaga

SEQ ID NO: 269072 - DNA, 25 bp, Probe sequence
ggttattacatcattacgacagaac

SEQ ID NO: 269073 - DNA, 25 bp, Probe sequence
ggcagtatgaaacgctatgaagctt

SEQ ID NO: 269074 - DNA, 25 bp, Probe sequence
tggcagtatgaaacgctatgaagct

SEQ ID NO: 269075 - DNA, 25 bp, Probe sequence
tggttattacatcattacgacagaa

SEQ ID NO: 269076 - DNA, 25 bp, Probe sequence
tgcagttataaacctagtgaacgtg

SEQ ID NO: 269077 - DNA, 25 bp, Probe sequence
tcattacgacagaacaagaaaagca

SEQ ID NO: 269078 - DNA, 25 bp, Probe sequence
tcaagcaatgaacgatggttacgaa

SEQ ID NO: 269079 - DNA, 25 bp, Probe sequence
tacatcattacgacagaacaagaaa

SEQ ID NO: 269080 - DNA, 25 bp, Probe sequence
tacgaagagtaatcaattcattagt

SEQ ID NO: 269081 - DNA, 25 bp, Probe sequence
tagtgaacgtggttattacatcatt

SEQ ID NO: 269082 - DNA, 25 bp, Probe sequence
ttattacatcattacgacagaacaa

SEQ ID NO: 269083 - DNA, 25 bp, Probe sequence
gcccgaaccgtacaaatatgaaact

SEQ ID NO: 269084 - DNA, 25 bp, Probe sequence
atattaactgatttagattactgga

SEQ ID NO: 269085 - DNA, 25 bp, Probe sequence
atatgcctctattgtctgatgacca

SEQ ID NO: 269086 - DNA, 25 bp, Probe sequence
atacttaaatccacatattccaaaa

SEQ ID NO: 269087 - DNA, 25 bp, Probe sequence
atcctaatatgcccgaaccgtacaa

SEQ ID NO: 269088 - DNA, 25 bp, Probe sequence
atgcctctattgtctgatgaccagc

SEQ ID NO: 269089 - DNA, 25 bp, Probe sequence
agacgataccccagcaatatgaaat

SEQ ID NO: 269090 - DNA, 25 bp, Probe sequence
acctagggaatacttaaatccacat

SEQ ID NO: 269091 - DNA, 25 bp, Probe sequence
acgcatttaagacgataccccagca

SEQ ID NO: 269092 - DNA, 25 bp, Probe sequence
aaatccacatattccaaaaggtaga

SEQ ID NO: 269093 - DNA, 25 bp, Probe sequence
aactgattatagaaacatacctagg

SEQ ID NO: 269094 - DNA, 25 bp, Probe sequence
aagtagtattgttagcgtacagtaa

SEQ ID NO: 269095 - DNA, 25 bp, Probe sequence
aataaatatgcctctattgtctgat

SEQ ID NO: 269096 - DNA, 25 bp, Probe sequence
ctaatatgcccgaaccgtacaaata

SEQ ID NO: 269097 - DNA, 25 bp, Probe sequence
cgataccccagcaatatgaaatatt

SEQ ID NO: 269098 - DNA, 25 bp, Probe sequence
gcctctattgtctgatgaccagcta

SEQ ID NO: 269099 - DNA, 25 bp, Probe sequence
gcatttaagacgataccccagcaat

SEQ ID NO: 269100 - DNA, 25 bp, Probe sequence
gaaccgtacaaatatgaaactgatt

SEQ ID NO: 269101 - DNA, 25 bp, Probe sequence
gacggatatatatattcgattcaat

SEQ ID NO: 269102 - DNA, 25 bp, Probe sequence
gaggaatagttaaatggaacgcatt

SEQ ID NO: 269103 - DNA, 25 bp, Probe sequence
gatgaccagctacaagaaattaatg

SEQ ID NO: 269104 - DNA, 25 bp, Probe sequence
gattatcactaattccaattcaaac

SEQ ID NO: 269105 - DNA, 25 bp, Probe sequence
ggatttatgattatcactaattcca

SEQ ID NO: 269106 - DNA, 25 bp, Probe sequence
ggaacgcatttaagacgatacccca

SEQ ID NO: 269107 - DNA, 25 bp, Probe sequence
taattccaattcaaacaataaacta

SEQ ID NO: 269108 - DNA, 25 bp, Probe sequence
taaatcctaatatgcccgaaccgta

SEQ ID NO: 269109 - DNA, 25 bp, Probe sequence
tacctttaagtagtattgttagcgt

SEQ ID NO: 269110 - DNA, 25 bp, Probe sequence
tagaaacatacctagggaatactta

SEQ ID NO: 269111 - DNA, 25 bp, Probe sequence
tagattactggaaagacggatatat

SEQ ID NO: 269112 - DNA, 25 bp, Probe sequence
tatgcccgaaccgtacaaatatgaa

SEQ ID NO: 269113 - DNA, 25 bp, Probe sequence
tatattcgattcaatgttacattaa

SEQ ID NO: 269114 - DNA, 25 bp, Probe sequence
tattgtctgatgaccagctacaaga

SEQ ID NO: 269115 - DNA, 25 bp, Probe sequence
tattggaacaacacatagaagatca

SEQ ID NO: 269116 - DNA, 25 bp, Probe sequence
ttaagacgataccccagcaatatga

SEQ ID NO: 269117 - DNA, 25 bp, Probe sequence
atttgttatccagaagatggacaac

SEQ ID NO: 269118 - DNA, 25 bp, Probe sequence
atttgttggatggtagagttcctaa

SEQ ID NO: 269119 - DNA, 25 bp, Probe sequence
atatagggagaactagtatcacaca

SEQ ID NO: 269120 - DNA, 25 bp, Probe sequence
atcacgactatatagggagaactag

SEQ ID NO: 269121 - DNA, 25 bp, Probe sequence
atcagttagaagatttgtttaaaga

SEQ ID NO: 269122 - DNA, 25 bp, Probe sequence
atgcgttatttgttggatggtagag

SEQ ID NO: 269123 - DNA, 25 bp, Probe sequence
atgggtgcctatggtattaagaata

SEQ ID NO: 269124 - DNA, 25 bp, Probe sequence
aggagataccgatatatcagttaga

SEQ ID NO: 269125 - DNA, 25 bp, Probe sequence
accgatatatcagttagaagatttg

SEQ ID NO: 269126 - DNA, 25 bp, Probe sequence
acaacttgatttagtgtatagaggt

SEQ ID NO: 269127 - DNA, 25 bp, Probe sequence
aagtgaacaacttgatttagtgtat

SEQ ID NO: 269128 - DNA, 25 bp, Probe sequence
aatgcgttatttgttggatggtaga

SEQ ID NO: 269129 - DNA, 25 bp, Probe sequence
aatcacgactatatagggagaacta

SEQ ID NO: 269130 - DNA, 25 bp, Probe sequence
catgggtgcctatggtattaagaat

SEQ ID NO: 269131 - DNA, 25 bp, Probe sequence
cttgatttagtgtatagaggtagtt

SEQ ID NO: 269132 - DNA, 25 bp, Probe sequence
ctcatgggtgcctatggtattaaga

SEQ ID NO: 269133 - DNA, 25 bp, Probe sequence
cgttatttgttggatggtagagttc

SEQ ID NO: 269134 - DNA, 25 bp, Probe sequence
ccctcatgggtgcctatggtattaa

SEQ ID NO: 269135 - DNA, 25 bp, Probe sequence
cctcatgggtgcctatggtattaag

SEQ ID NO: 269136 - DNA, 25 bp, Probe sequence
gcgttatttgttggatggtagagtt

SEQ ID NO: 269137 - DNA, 25 bp, Probe sequence
gaacaacttgatttagtgtatagag

SEQ ID NO: 269138 - DNA, 25 bp, Probe sequence
gagataccgatatatcagttagaag

SEQ ID NO: 269139 - DNA, 25 bp, Probe sequence
gataccgatatatcagttagaagat

SEQ ID NO: 269140 - DNA, 25 bp, Probe sequence
gttatccagaagatggacaacaaac

SEQ ID NO: 269141 - DNA, 25 bp, Probe sequence
gtgaacaacttgatttagtgtatag

SEQ ID NO: 269142 - DNA, 25 bp, Probe sequence
gggtgcctatggtattaagaataaa

SEQ ID NO: 269143 - DNA, 25 bp, Probe sequence
tgggtgcctatggtattaagaataa

SEQ ID NO: 269144 - DNA, 25 bp, Probe sequence
tgatttagtgtatagaggtagtttt

SEQ ID NO: 269145 - DNA, 25 bp, Probe sequence
tgcgttatttgttggatggtagagt

SEQ ID NO: 269146 - DNA, 25 bp, Probe sequence
tcatgggtgcctatggtattaagaa

SEQ ID NO: 269147 - DNA, 25 bp, Probe sequence
taatgcgttatttgttggatggtag

SEQ ID NO: 269148 - DNA, 25 bp, Probe sequence
taaggagataccgatatatcagtta

SEQ ID NO: 269149 - DNA, 25 bp, Probe sequence
taccattagctatttgttatccaga

SEQ ID NO: 269150 - DNA, 25 bp, Probe sequence
ttaccattagctatttgttatccag

SEQ ID NO: 269151 - DNA, 25 bp, Probe sequence
atattgatcattttgatccgaaagc

SEQ ID NO: 269152 - DNA, 25 bp, Probe sequence
atatggaagcggtcaatcattggca

SEQ ID NO: 269153 - DNA, 25 bp, Probe sequence
atggaagcggtcaatcattggcatt

SEQ ID NO: 269154 - DNA, 25 bp, Probe sequence
agagttgttgtaccaaatgacgggg

SEQ ID NO: 269155 - DNA, 25 bp, Probe sequence
agaaatgccacggccgtgattgagt

SEQ ID NO: 269156 - DNA, 25 bp, Probe sequence
agcggtcaatcattggcatttatct

SEQ ID NO: 269157 - DNA, 25 bp, Probe sequence
acatataagaaatgccacggccgtg

SEQ ID NO: 269158 - DNA, 25 bp, Probe sequence
aacgacttaggtaatagagttgttg

SEQ ID NO: 269159 - DNA, 25 bp, Probe sequence
aatgccacggccgtgattgagtatg

SEQ ID NO: 269160 - DNA, 25 bp, Probe sequence
cacacattggagaaattgagttgat

SEQ ID NO: 269161 - DNA, 25 bp, Probe sequence
cacggccgtgattgagtatggaggt

SEQ ID NO: 269162 - DNA, 25 bp, Probe sequence
catttgcatattgatcattttgatc

SEQ ID NO: 269163 - DNA, 25 bp, Probe sequence
cggtcaatcattggcatttatctcg

SEQ ID NO: 269164 - DNA, 25 bp, Probe sequence
gccacggccgtgattgagtatggag

SEQ ID NO: 269165 - DNA, 25 bp, Probe sequence
gccgtgattgagtatggaggtaaac

SEQ ID NO: 269166 - DNA, 25 bp, Probe sequence
gaatttataaattctaacgacttag

SEQ ID NO: 269167 - DNA, 25 bp, Probe sequence
gaagcggtcaatcattggcatttat

SEQ ID NO: 269168 - DNA, 25 bp, Probe sequence
gaaatgccacggccgtgattgagta

SEQ ID NO: 269169 - DNA, 25 bp, Probe sequence
gacatataagaaatgccacggccgt

SEQ ID NO: 269170 - DNA, 25 bp, Probe sequence
gttgtaccaaatgacggggaattat

SEQ ID NO: 269171 - DNA, 25 bp, Probe sequence
gttgttgtaccaaatgacggggaat

SEQ ID NO: 269172 - DNA, 25 bp, Probe sequence
gtgacacacattggagaaattgagt

SEQ ID NO: 269173 - DNA, 25 bp, Probe sequence
gtggtgcaaatcaattctttgaagg

SEQ ID NO: 269174 - DNA, 25 bp, Probe sequence
ggtcaatcattggcatttatctcgt

SEQ ID NO: 269175 - DNA, 25 bp, Probe sequence
ggaagcggtcaatcattggcattta

SEQ ID NO: 269176 - DNA, 25 bp, Probe sequence
ggccgtgattgagtatggaggtaaa

SEQ ID NO: 269177 - DNA, 25 bp, Probe sequence
tggtggtgcaaatcaattctttgaa

SEQ ID NO: 269178 - DNA, 25 bp, Probe sequence
tgtaccaaatgacggggaattatta

SEQ ID NO: 269179 - DNA, 25 bp, Probe sequence
tgattaaaacagatgctcaacatgg

SEQ ID NO: 269180 - DNA, 25 bp, Probe sequence
tgccacggccgtgattgagtatgga

SEQ ID NO: 269181 - DNA, 25 bp, Probe sequence
taatggtggtgcaaatcaattcttt

SEQ ID NO: 269182 - DNA, 25 bp, Probe sequence
taagaaatgccacggccgtgattga

SEQ ID NO: 269183 - DNA, 25 bp, Probe sequence
tataagaaatgccacggccgtgatt

SEQ ID NO: 269184 - DNA, 25 bp, Probe sequence
ttaatgatgtgacacacattggaga

SEQ ID NO: 269185 - DNA, 25 bp, Probe sequence
atagtgcatcatcatctattaaaag

SEQ ID NO: 269186 - DNA, 25 bp, Probe sequence
atgtaataatgtgtcgaaaccggat

SEQ ID NO: 269187 - DNA, 25 bp, Probe sequence
ataatgtgtcgaaaccggataaaga

SEQ ID NO: 269188 - DNA, 25 bp, Probe sequence
ataataatgctcatagtgtgataga

SEQ ID NO: 269189 - DNA, 25 bp, Probe sequence
atgagtacagttcaaagtgatattt

SEQ ID NO: 269190 - DNA, 25 bp, Probe sequence
atgatgagtacagttcaaagtgata

SEQ ID NO: 269191 - DNA, 25 bp, Probe sequence
atgtgtcgaaaccggataaagatga

SEQ ID NO: 269192 - DNA, 25 bp, Probe sequence
agtggaaataataatgctcatagtg

SEQ ID NO: 269193 - DNA, 25 bp, Probe sequence
agtaagaatcaatctgttgctgaag

SEQ ID NO: 269194 - DNA, 25 bp, Probe sequence
agaatcaatctgttgctgaagcaat

SEQ ID NO: 269195 - DNA, 25 bp, Probe sequence
aaataataatgctcatagtgtgata

SEQ ID NO: 269196 - DNA, 25 bp, Probe sequence
aagaatcaatctgttgctgaagcaa

SEQ ID NO: 269197 - DNA, 25 bp, Probe sequence
aatgtgtcgaaaccggataaagatg

SEQ ID NO: 269198 - DNA, 25 bp, Probe sequence
aataatgtgtcgaaaccggataaag

SEQ ID NO: 269199 - DNA, 25 bp, Probe sequence
aatagtgcatcatcatctattaaaa

SEQ ID NO: 269200 - DNA, 25 bp, Probe sequence
catgtaataatgtgtcgaaaccgga

SEQ ID NO: 269201 - DNA, 25 bp, Probe sequence
gaatcaatctgttgctgaagcaata

SEQ ID NO: 269202 - DNA, 25 bp, Probe sequence
gaaaccggataaagatgaaagtaca

SEQ ID NO: 269203 - DNA, 25 bp, Probe sequence
gaaataataatgctcatagtgtgat

SEQ ID NO: 269204 - DNA, 25 bp, Probe sequence
gatgaaagtacaacagtaagtggaa

SEQ ID NO: 269205 - DNA, 25 bp, Probe sequence
gatgagtacagttcaaagtgatatt

SEQ ID NO: 269206 - DNA, 25 bp, Probe sequence
gtaagaatcaatctgttgctgaagc

SEQ ID NO: 269207 - DNA, 25 bp, Probe sequence
gtaataatgtgtcgaaaccggataa

SEQ ID NO: 269208 - DNA, 25 bp, Probe sequence
gtaagtggaaataataatgctcata

SEQ ID NO: 269209 - DNA, 25 bp, Probe sequence
gtcgaaaccggataaagatgaaagt

SEQ ID NO: 269210 - DNA, 25 bp, Probe sequence
gtgtcgaaaccggataaagatgaaa

SEQ ID NO: 269211 - DNA, 25 bp, Probe sequence
gtggaaataataatgctcatagtgt

SEQ ID NO: 269212 - DNA, 25 bp, Probe sequence
ggaaataataatgctcatagtgtga

SEQ ID NO: 269213 - DNA, 25 bp, Probe sequence
tgtgtcgaaaccggataaagatgaa

SEQ ID NO: 269214 - DNA, 25 bp, Probe sequence
tgtaataatgtgtcgaaaccggata

SEQ ID NO: 269215 - DNA, 25 bp, Probe sequence
tgagtacagttcaaagtgatatttt

SEQ ID NO: 269216 - DNA, 25 bp, Probe sequence
taataatgtgtcgaaaccggataaa

SEQ ID NO: 269217 - DNA, 25 bp, Probe sequence
taatgtgtcgaaaccggataaagat

SEQ ID NO: 269218 - DNA, 25 bp, Probe sequence
taagaatcaatctgttgctgaagca

SEQ ID NO: 269219 - DNA, 25 bp, Probe sequence
atacctcaacttagctaaacaacgt

SEQ ID NO: 269220 - DNA, 25 bp, Probe sequence
atcaagcgaatttcttttggttaca

SEQ ID NO: 269221 - DNA, 25 bp, Probe sequence
atctctccatctactgtaagtcgta

SEQ ID NO: 269222 - DNA, 25 bp, Probe sequence
atgtatgaaccctatgtccgattat

SEQ ID NO: 269223 - DNA, 25 bp, Probe sequence
atgtccgattatttcgcgacctatt

SEQ ID NO: 269224 - DNA, 25 bp, Probe sequence
agtgcgcctatgtgtaatgatacct

SEQ ID NO: 269225 - DNA, 25 bp, Probe sequence
agcccaataatggactggccgccta

SEQ ID NO: 269226 - DNA, 25 bp, Probe sequence
agataactgtatctctccatctact

SEQ ID NO: 269227 - DNA, 25 bp, Probe sequence
agcaacagtggttaatgctgtacta

SEQ ID NO: 269228 - DNA, 25 bp, Probe sequence
acatggtaagcgtgtttctcgtatt

SEQ ID NO: 269229 - DNA, 25 bp, Probe sequence
acaagattcttgcgtgcctatttcg

SEQ ID NO: 269230 - DNA, 25 bp, Probe sequence
aaagaagacaaccaagcccaataat

SEQ ID NO: 269231 - DNA, 25 bp, Probe sequence
aaggagacaagtgcgcctatgtgta

SEQ ID NO: 269232 - DNA, 25 bp, Probe sequence
aatacaatttattacccagcattta

SEQ ID NO: 269233 - DNA, 25 bp, Probe sequence
ctcctacgaacttgtccaaggatta

SEQ ID NO: 269234 - DNA, 25 bp, Probe sequence
cgacctatttcctaatgcagctatt

SEQ ID NO: 269235 - DNA, 25 bp, Probe sequence
gccttcggcctgttattgttgtgga

SEQ ID NO: 269236 - DNA, 25 bp, Probe sequence
gcgtgtttctcgtattactttactt

SEQ ID NO: 269237 - DNA, 25 bp, Probe sequence
gaatgcaatggcacttttactgcta

SEQ ID NO: 269238 - DNA, 25 bp, Probe sequence
gaactaaagcggctaattcattacg

SEQ ID NO: 269239 - DNA, 25 bp, Probe sequence
gaaatttcaacaactttaaagcacg

SEQ ID NO: 269240 - DNA, 25 bp, Probe sequence
gacagattccatatcgttcaacatt

SEQ ID NO: 269241 - DNA, 25 bp, Probe sequence
gacattgtagaattcatgctttcaa

SEQ ID NO: 269242 - DNA, 25 bp, Probe sequence
gttgatgagtcgtgttttatctcaa

SEQ ID NO: 269243 - DNA, 25 bp, Probe sequence
gtactaacgtataagccttcggcct

SEQ ID NO: 269244 - DNA, 25 bp, Probe sequence
gttaagacggttactattgacatgt

SEQ ID NO: 269245 - DNA, 25 bp, Probe sequence
gtttgccagaacacatcgctatgga

SEQ ID NO: 269246 - DNA, 25 bp, Probe sequence
gtataacacatacctcaacttagct

SEQ ID NO: 269247 - DNA, 25 bp, Probe sequence
ggcacttttactgctaaaacgtcaa

SEQ ID NO: 269248 - DNA, 25 bp, Probe sequence
tgcgtgcctatttcgagcgattcga

SEQ ID NO: 269249 - DNA, 25 bp, Probe sequence
taaggcttataaacgctcatctgac

SEQ ID NO: 269250 - DNA, 25 bp, Probe sequence
taaacgctcatctgacattgtagaa

SEQ ID NO: 269251 - DNA, 25 bp, Probe sequence
ttatttcgcgacctatttcctaatg

SEQ ID NO: 269252 - DNA, 25 bp, Probe sequence
ttatctcaagatgtgttactcaaaa

SEQ ID NO: 269253 - DNA, 25 bp, Probe sequence
atggcaatgtaccattttcaaaata

SEQ ID NO: 269254 - DNA, 25 bp, Probe sequence
aaattatcccgatcaatcattaaac

SEQ ID NO: 269255 - DNA, 25 bp, Probe sequence
aaagtgcctataatagcgctagtag

SEQ ID NO: 269256 - DNA, 25 bp, Probe sequence
aaacaagctggaattttctttgata

SEQ ID NO: 269257 - DNA, 25 bp, Probe sequence
aaaacttcattaatcactgatgatg

SEQ ID NO: 269258 - DNA, 25 bp, Probe sequence
aaaatctttatcacacatgcactat

SEQ ID NO: 269259 - DNA, 25 bp, Probe sequence
aacttatcatggtacagaaaacaca

SEQ ID NO: 269260 - DNA, 25 bp, Probe sequence
aagaatcacagtaaacagcgccatg

SEQ ID NO: 269261 - DNA, 25 bp, Probe sequence
aagtgcaactgcaaaaagtgcctat

SEQ ID NO: 269262 - DNA, 25 bp, Probe sequence
aatgctggactagattcaatgatat

SEQ ID NO: 269263 - DNA, 25 bp, Probe sequence
aataatgaatttgaacctaagcgaa

SEQ ID NO: 269264 - DNA, 25 bp, Probe sequence
aataacttgtcttttgatgatgtgt

SEQ ID NO: 269265 - DNA, 25 bp, Probe sequence
aataaatcagattctactacattaa

SEQ ID NO: 269266 - DNA, 25 bp, Probe sequence
caaataagccttaatacagttttag

SEQ ID NO: 269267 - DNA, 25 bp, Probe sequence
caggtaattttattcctaaatacag

SEQ ID NO: 269268 - DNA, 25 bp, Probe sequence
gccgataaactttcaaatattctcg

SEQ ID NO: 269269 - DNA, 25 bp, Probe sequence
gaatttctttgccgataaactttca

SEQ ID NO: 269270 - DNA, 25 bp, Probe sequence
gaatttgctgaatccttatctaatg

SEQ ID NO: 269271 - DNA, 25 bp, Probe sequence
gaatggtttttctgttagagtttct

SEQ ID NO: 269272 - DNA, 25 bp, Probe sequence
gaagaaaatcctcacgcacatttat

SEQ ID NO: 269273 - DNA, 25 bp, Probe sequence
gaacgtatgccgaagtatataaatc

SEQ ID NO: 269274 - DNA, 25 bp, Probe sequence
gaaaacaacaagcctatggtttaat

SEQ ID NO: 269275 - DNA, 25 bp, Probe sequence
gaaacgcataaaagaggctcaaata

SEQ ID NO: 269276 - DNA, 25 bp, Probe sequence
gaaatctcacaaattaaatgctttt

SEQ ID NO: 269277 - DNA, 25 bp, Probe sequence
gaaattataattggtttgccgaatg

SEQ ID NO: 269278 - DNA, 25 bp, Probe sequence
gagatatttagagaacgtatgccga

SEQ ID NO: 269279 - DNA, 25 bp, Probe sequence
gatagagatgttttaccagctaata

SEQ ID NO: 269280 - DNA, 25 bp, Probe sequence
gttagagtttctgctgattcatata

SEQ ID NO: 269281 - DNA, 25 bp, Probe sequence
gtaaacagcgccatgagttgaaaaa

SEQ ID NO: 269282 - DNA, 25 bp, Probe sequence
ggtttgccgaatgaatttgatccaa

SEQ ID NO: 269283 - DNA, 25 bp, Probe sequence
tcctcacgcacatttattatgtaca

SEQ ID NO: 269284 - DNA, 25 bp, Probe sequence
taaatttgtatttggggctattcaa

SEQ ID NO: 269285 - DNA, 25 bp, Probe sequence
tagtcaagttgcacgagaaattata

SEQ ID NO: 269286 - DNA, 25 bp, Probe sequence
tatgtacattacgtggtttagataa

SEQ ID NO: 269287 - DNA, 25 bp, Probe sequence
attgggcacactgattggagtaaca

SEQ ID NO: 269288 - DNA, 25 bp, Probe sequence
ataaccccatattatacttataatg

SEQ ID NO: 269289 - DNA, 25 bp, Probe sequence
ataatgctaattttattctggataa

SEQ ID NO: 269290 - DNA, 25 bp, Probe sequence
aggcatctggtttgtcgttgatcat

SEQ ID NO: 269291 - DNA, 25 bp, Probe sequence
acaaaggaagctgatagcggtattt

SEQ ID NO: 269292 - DNA, 25 bp, Probe sequence
aaaagcttatggcaaggacttgaaa

SEQ ID NO: 269293 - DNA, 25 bp, Probe sequence
aaaagacattaggcatctggtttgt

SEQ ID NO: 269294 - DNA, 25 bp, Probe sequence
aacaggcacaggcagcaataacccc

SEQ ID NO: 269295 - DNA, 25 bp, Probe sequence
aacagttgttgaaaattcggcgcca

SEQ ID NO: 269296 - DNA, 25 bp, Probe sequence
aaccagtaaagtttgtgtagcagca

SEQ ID NO: 269297 - DNA, 25 bp, Probe sequence
aattcggcgccaacaagtaaacagg

SEQ ID NO: 269298 - DNA, 25 bp, Probe sequence
cacaggcagcaataaccccatatta

SEQ ID NO: 269299 - DNA, 25 bp, Probe sequence
cattagcattgggcacactgattgg

SEQ ID NO: 269300 - DNA, 25 bp, Probe sequence
cattaggcatctggtttgtcgttga

SEQ ID NO: 269301 - DNA, 25 bp, Probe sequence
gcggtattttttactatcaaaatgc

SEQ ID NO: 269302 - DNA, 25 bp, Probe sequence
gcatctggtttgtcgttgatcataa

SEQ ID NO: 269303 - DNA, 25 bp, Probe sequence
gcagcaacattagcattgggcacac

SEQ ID NO: 269304 - DNA, 25 bp, Probe sequence
gcaataaccccatattatacttata

SEQ ID NO: 269305 - DNA, 25 bp, Probe sequence
gcaaaaggaaacgaagcaagtcaat

SEQ ID NO: 269306 - DNA, 25 bp, Probe sequence
gcaacattagcattgggcacactga

SEQ ID NO: 269307 - DNA, 25 bp, Probe sequence
gcaagtcaattgcaatttgtagtta

SEQ ID NO: 269308 - DNA, 25 bp, Probe sequence
gatatccaaaaagcttatggcaagg

SEQ ID NO: 269309 - DNA, 25 bp, Probe sequence
gtttgtgtagcagcaacattagcat

SEQ ID NO: 269310 - DNA, 25 bp, Probe sequence
gtagcagcaacattagcattgggca

SEQ ID NO: 269311 - DNA, 25 bp, Probe sequence
gtaacagttggacatacaccataca

SEQ ID NO: 269312 - DNA, 25 bp, Probe sequence
ggataagaattttattaacgcgatt

SEQ ID NO: 269313 - DNA, 25 bp, Probe sequence
ggacatacaccatacaaaacaagta

SEQ ID NO: 269314 - DNA, 25 bp, Probe sequence
ggcacactgattggagtaacagttg

SEQ ID NO: 269315 - DNA, 25 bp, Probe sequence
ggcagcaataaccccatattatact

SEQ ID NO: 269316 - DNA, 25 bp, Probe sequence
ggcgccaacaagtaaacaggcacag

SEQ ID NO: 269317 - DNA, 25 bp, Probe sequence
tgatcataatagagttgtcgaagta

SEQ ID NO: 269318 - DNA, 25 bp, Probe sequence
tgaaaattcggcgccaacaagtaaa

SEQ ID NO: 269319 - DNA, 25 bp, Probe sequence
tagcattgggcacactgattggagt

SEQ ID NO: 269320 - DNA, 25 bp, Probe sequence
tagagttgtcgaagtaacagttgga

SEQ ID NO: 269321 - DNA, 25 bp, Probe sequence
aggcggcaacaacaccttactatac

SEQ ID NO: 269322 - DNA, 25 bp, Probe sequence
atcggtcataacgctaattttataa

SEQ ID NO: 269323 - DNA, 25 bp, Probe sequence
agaagcacaggcggcaacaacacct

SEQ ID NO: 269324 - DNA, 25 bp, Probe sequence
agcgaatcaattacaatttatcgtt

SEQ ID NO: 269325 - DNA, 25 bp, Probe sequence
accttactatacttatcatggatat

SEQ ID NO: 269326 - DNA, 25 bp, Probe sequence
aaattagcgaagacaaatgcgacaa

SEQ ID NO: 269327 - DNA, 25 bp, Probe sequence
aacaccttactatacttatcatgga

SEQ ID NO: 269328 - DNA, 25 bp, Probe sequence
aactttgtgcagcaacgacattagc

SEQ ID NO: 269329 - DNA, 25 bp, Probe sequence
aacgacattagcattaggtacttta

SEQ ID NO: 269330 - DNA, 25 bp, Probe sequence
aacgaaagaatctgatagcggtatt

SEQ ID NO: 269331 - DNA, 25 bp, Probe sequence
aagatattcaaaaagcttatggtaa

SEQ ID NO: 269332 - DNA, 25 bp, Probe sequence
aagtcattaggcatttggtttgttg

SEQ ID NO: 269333 - DNA, 25 bp, Probe sequence
aaggtgtaactgcaaaaggaaatga

SEQ ID NO: 269334 - DNA, 25 bp, Probe sequence
caactaaactttgtgcagcaacgac

SEQ ID NO: 269335 - DNA, 25 bp, Probe sequence
catggatatatcggtcataacgcta

SEQ ID NO: 269336 - DNA, 25 bp, Probe sequence
cgctattaaatatgacaacgtgaca

SEQ ID NO: 269337 - DNA, 25 bp, Probe sequence
gcatttggtttgttgttgatcataa

SEQ ID NO: 269338 - DNA, 25 bp, Probe sequence
gcatcaccaatacatcaagaagcac

SEQ ID NO: 269339 - DNA, 25 bp, Probe sequence
gcagcaacgacattagcattaggta

SEQ ID NO: 269340 - DNA, 25 bp, Probe sequence
gcaacaacaccttactatacttatc

SEQ ID NO: 269341 - DNA, 25 bp, Probe sequence
gagtggttgaagttacagtgggaca

SEQ ID NO: 269342 - DNA, 25 bp, Probe sequence
gatatatcggtcataacgctaattt

SEQ ID NO: 269343 - DNA, 25 bp, Probe sequence
gttgtagggactgcatcaccaatac

SEQ ID NO: 269344 - DNA, 25 bp, Probe sequence
gttacagtgggacatacgccataca

SEQ ID NO: 269345 - DNA, 25 bp, Probe sequence
gtactttaattggcgcaacagttgt

SEQ ID NO: 269346 - DNA, 25 bp, Probe sequence
gggacatacgccatacaaaacgagt

SEQ ID NO: 269347 - DNA, 25 bp, Probe sequence
ggataagcattttattaacgctatt

SEQ ID NO: 269348 - DNA, 25 bp, Probe sequence
ggactgcatcaccaatacatcaaga

SEQ ID NO: 269349 - DNA, 25 bp, Probe sequence
ggcgcaacagttgtagggactgcat

SEQ ID NO: 269350 - DNA, 25 bp, Probe sequence
tacatcaagaagcacaggcggcaac

SEQ ID NO: 269351 - DNA, 25 bp, Probe sequence
tagggactgcatcaccaatacatca

SEQ ID NO: 269352 - DNA, 25 bp, Probe sequence
tatgacaacgtgacatttaatggta

SEQ ID NO: 269353 - DNA, 25 bp, Probe sequence
ttaggtactttaattggcgcaacag

SEQ ID NO: 269354 - DNA, 25 bp, Probe sequence
ttaggcatttggtttgttgttgatc

SEQ ID NO: 269355 - DNA, 25 bp, Probe sequence
attgcctgtagaatttcttttcgaa

SEQ ID NO: 269356 - DNA, 25 bp, Probe sequence
cttttcgaaattctctgtgttgggg

SEQ ID NO: 269357 - DNA, 25 bp, Probe sequence
accccaacttgcattgtctgtagaa

SEQ ID NO: 269358 - DNA, 25 bp, Probe sequence
accccaacttgcattgcctgtagaa

SEQ ID NO: 269359 - DNA, 25 bp, Probe sequence
acttgcattgtctgtagaaattggg

SEQ ID NO: 269360 - DNA, 25 bp, Probe sequence
acttgcattgcctgtagaatttctt

SEQ ID NO: 269361 - DNA, 25 bp, Probe sequence
aacttgcattgcctgtagaatttct

SEQ ID NO: 269362 - DNA, 25 bp, Probe sequence
caacttgcattgcctgtagaatttc

SEQ ID NO: 269363 - DNA, 25 bp, Probe sequence
caacttgcattgtctgtagaaattg

SEQ ID NO: 269364 - DNA, 25 bp, Probe sequence
caccccaacttgcattgtctgtaga

SEQ ID NO: 269365 - DNA, 25 bp, Probe sequence
cattgcctgtagaatttcttttcga

SEQ ID NO: 269366 - DNA, 25 bp, Probe sequence
cttgcattgcctgtagaatttcttt

SEQ ID NO: 269367 - DNA, 25 bp, Probe sequence
cccaacttgcattgcctgtagaatt

SEQ ID NO: 269368 - DNA, 25 bp, Probe sequence
cccaacttgcattgtctgtagaaat

SEQ ID NO: 269369 - DNA, 25 bp, Probe sequence
ccccaacttgcattgcctgtagaat

SEQ ID NO: 269370 - DNA, 25 bp, Probe sequence
ccccaacttgcattgtctgtagaaa

SEQ ID NO: 269371 - DNA, 25 bp, Probe sequence
ccaacttgcattgcctgtagaattt

SEQ ID NO: 269372 - DNA, 25 bp, Probe sequence
ccaacttgcattgtctgtagaaatt

SEQ ID NO: 269373 - DNA, 25 bp, Probe sequence
gcattgtctgtagaaattgggaatc

SEQ ID NO: 269374 - DNA, 25 bp, Probe sequence
gcattgcctgtagaatttcttttcg

SEQ ID NO: 269375 - DNA, 25 bp, Probe sequence
gatattttcgcaaaatttatttcgt

SEQ ID NO: 269376 - DNA, 25 bp, Probe sequence
tgcattgcctgtagaatttcttttc

SEQ ID NO: 269377 - DNA, 25 bp, Probe sequence
tgcctgtagaatttcttttcgaaat

SEQ ID NO: 269378 - DNA, 25 bp, Probe sequence
tcgcaaaatttatttcgttgtccca

SEQ ID NO: 269379 - DNA, 25 bp, Probe sequence
tcttttcgaaattctctgtgttggg

SEQ ID NO: 269380 - DNA, 25 bp, Probe sequence
tattttcgcaaaatttatttcgttg

SEQ ID NO: 269381 - DNA, 25 bp, Probe sequence
tttcgaaattctctgtgttggggcc

SEQ ID NO: 269382 - DNA, 25 bp, Probe sequence
tttcttttcgaaattctctgtgttg

SEQ ID NO: 269383 - DNA, 25 bp, Probe sequence
ttttcgaaattctctgtgttggggc

SEQ ID NO: 269384 - DNA, 25 bp, Probe sequence
ttgcattgtctgtagaaattgggaa

SEQ ID NO: 269385 - DNA, 25 bp, Probe sequence
ttcttttcgaaattctctgtgttgg

SEQ ID NO: 269386 - DNA, 25 bp, Probe sequence
ttgcctgtagaatttcttttcgaaa

SEQ ID NO: 269387 - DNA, 25 bp, Probe sequence
ttgtctgtagaaattgggaatccaa

SEQ ID NO: 269388 - DNA, 25 bp, Probe sequence
ttgcattgcctgtagaatttctttt

SEQ ID NO: 269389 - DNA, 25 bp, Probe sequence
attggtagagcaactgacttgtaat

SEQ ID NO: 269390 - DNA, 25 bp, Probe sequence
agagcaactgacttgtaatcagtag

SEQ ID NO: 269391 - DNA, 25 bp, Probe sequence
agcaactgacttgtaatcagtaggt

SEQ ID NO: 269392 - DNA, 25 bp, Probe sequence
agctcaattggtagagcaactgact

SEQ ID NO: 269393 - DNA, 25 bp, Probe sequence
aactgacttgtaatcagtaggttgg

SEQ ID NO: 269394 - DNA, 25 bp, Probe sequence
aattggtagagcaactgacttgtaa

SEQ ID NO: 269395 - DNA, 25 bp, Probe sequence
caattggtagagcaactgacttgta

SEQ ID NO: 269396 - DNA, 25 bp, Probe sequence
caactgacttgtaatcagtaggttg

SEQ ID NO: 269397 - DNA, 25 bp, Probe sequence
ctagctcaattggtagagcaactga

SEQ ID NO: 269398 - DNA, 25 bp, Probe sequence
ctcaattggtagagcaactgacttg

SEQ ID NO: 269399 - DNA, 25 bp, Probe sequence
cggcctagctcaattggtagagcaa

SEQ ID NO: 269400 - DNA, 25 bp, Probe sequence
ccggcctagctcaattggtagagca

SEQ ID NO: 269401 - DNA, 25 bp, Probe sequence
cctagctcaattggtagagcaactg

SEQ ID NO: 269402 - DNA, 25 bp, Probe sequence
gcctagctcaattggtagagcaact

SEQ ID NO: 269403 - DNA, 25 bp, Probe sequence
gccggcctagctcaattggtagagc

SEQ ID NO: 269404 - DNA, 25 bp, Probe sequence
gtaggttgggggttcaagtcctctg

SEQ ID NO: 269405 - DNA, 25 bp, Probe sequence
gcaactgacttgtaatcagtaggtt

SEQ ID NO: 269406 - DNA, 25 bp, Probe sequence
gacttgtaatcagtaggttgggggt

SEQ ID NO: 269407 - DNA, 25 bp, Probe sequence
gagcaactgacttgtaatcagtagg

SEQ ID NO: 269408 - DNA, 25 bp, Probe sequence
tgtaatcagtaggttgggggttcaa

SEQ ID NO: 269409 - DNA, 25 bp, Probe sequence
gtaatcagtaggttgggggttcaag

SEQ ID NO: 269410 - DNA, 25 bp, Probe sequence
gtagagcaactgacttgtaatcagt

SEQ ID NO: 269411 - DNA, 25 bp, Probe sequence
ggtagagcaactgacttgtaatcag

SEQ ID NO: 269412 - DNA, 25 bp, Probe sequence
taatcagtaggttgggggttcaagt

SEQ ID NO: 269413 - DNA, 25 bp, Probe sequence
ggcctagctcaattggtagagcaac

SEQ ID NO: 269414 - DNA, 25 bp, Probe sequence
tggtagagcaactgacttgtaatca

SEQ ID NO: 269415 - DNA, 25 bp, Probe sequence
tgacttgtaatcagtaggttggggg

SEQ ID NO: 269416 - DNA, 25 bp, Probe sequence
taggttgggggttcaagtcctctgg

SEQ ID NO: 269417 - DNA, 25 bp, Probe sequence
tcagtaggttgggggttcaagtcct

SEQ ID NO: 269418 - DNA, 25 bp, Probe sequence
tcaattggtagagcaactgacttgt

SEQ ID NO: 269419 - DNA, 25 bp, Probe sequence
tagctcaattggtagagcaactgac

SEQ ID NO: 269420 - DNA, 25 bp, Probe sequence
tagagcaactgacttgtaatcagta

SEQ ID NO: 269421 - DNA, 25 bp, Probe sequence
ttgtaatcagtaggttgggggttca

SEQ ID NO: 269422 - DNA, 25 bp, Probe sequence
ttggtagagcaactgacttgtaatc

SEQ ID NO: 269423 - DNA, 25 bp, Probe sequence
atcaattaaacctattccgcgtgta

SEQ ID NO: 269424 - DNA, 25 bp, Probe sequence
atggctcccaaacattacagtcatg

SEQ ID NO: 269425 - DNA, 25 bp, Probe sequence
acattcacgcgttaagacattctta

SEQ ID NO: 269426 - DNA, 25 bp, Probe sequence
acaatggacatctctaatagaacta

SEQ ID NO: 269427 - DNA, 25 bp, Probe sequence
aaatactttggattacgtacagatc

SEQ ID NO: 269428 - DNA, 25 bp, Probe sequence
aaacacgatgcaatagccatttttg

SEQ ID NO: 269429 - DNA, 25 bp, Probe sequence
aacctaagtttatgatgcgtgaaga

SEQ ID NO: 269430 - DNA, 25 bp, Probe sequence
aatcaatgccaagagtttcgtaaat

SEQ ID NO: 269431 - DNA, 25 bp, Probe sequence
aattctgctcgtacaatttggtcag

SEQ ID NO: 269432 - DNA, 25 bp, Probe sequence
cagatagttcagaggatattgttcc

SEQ ID NO: 269433 - DNA, 25 bp, Probe sequence
ccccattataacattcacgcgttaa

SEQ ID NO: 269434 - DNA, 25 bp, Probe sequence
gctcgtacaatttggtcaggtttta

SEQ ID NO: 269435 - DNA, 25 bp, Probe sequence
gcggtttttcaactaagcgtgaagc

SEQ ID NO: 269436 - DNA, 25 bp, Probe sequence
gcgtgaagctaagagagcagaggct

SEQ ID NO: 269437 - DNA, 25 bp, Probe sequence
gcatcttatcttgcaaataatggtg

SEQ ID NO: 269438 - DNA, 25 bp, Probe sequence
gcacttacagccatttatacactca

SEQ ID NO: 269439 - DNA, 25 bp, Probe sequence
gaaacgatgggcacttacagccatt

SEQ ID NO: 269440 - DNA, 25 bp, Probe sequence
gacatgctcaaatcactgaaacgat

SEQ ID NO: 269441 - DNA, 25 bp, Probe sequence
gacattcttatgcatcttatcttgc

SEQ ID NO: 269442 - DNA, 25 bp, Probe sequence
gatgaacgtagttattttattttcg

SEQ ID NO: 269443 - DNA, 25 bp, Probe sequence
gatgcaatagccatttttgacaagt

SEQ ID NO: 269444 - DNA, 25 bp, Probe sequence
gatattttcgttttacagtcactca

SEQ ID NO: 269445 - DNA, 25 bp, Probe sequence
gatattgttcctttacctaaattca

SEQ ID NO: 269446 - DNA, 25 bp, Probe sequence
gattacgtacagatccaacaatatc

SEQ ID NO: 269447 - DNA, 25 bp, Probe sequence
gattatgtttttcatcactatttag

SEQ ID NO: 269448 - DNA, 25 bp, Probe sequence
gttaactgaacgacatcaacgtgaa

SEQ ID NO: 269449 - DNA, 25 bp, Probe sequence
gtaagatgcaacgcggtttttcaac

SEQ ID NO: 269450 - DNA, 25 bp, Probe sequence
tgagacctaaaacaaaacgacgcaa

SEQ ID NO: 269451 - DNA, 25 bp, Probe sequence
tcctttacctaaattcatcaataca

SEQ ID NO: 269452 - DNA, 25 bp, Probe sequence
ttttcggaggaatggctcccaaaca

SEQ ID NO: 269453 - DNA, 25 bp, Probe sequence
tacagtcactcatgagacatgctca

SEQ ID NO: 269454 - DNA, 25 bp, Probe sequence
tacagccatttatacactcagaaaa

SEQ ID NO: 269455 - DNA, 25 bp, Probe sequence
tagaactatatatccgagaccaaaa

SEQ ID NO: 269456 - DNA, 25 bp, Probe sequence
tttaaagctaagttcgggcacataa

SEQ ID NO: 269457 - DNA, 25 bp, Probe sequence
tggtttgggaccaaggggtcgcagg

SEQ ID NO: 269458 - DNA, 25 bp, Probe sequence
ttggtttgggaccaaggggtcgcag

SEQ ID NO: 269459 - DNA, 25 bp, Probe sequence
agcttggtagagcacttggtttggg

SEQ ID NO: 269460 - DNA, 25 bp, Probe sequence
gcttggtagagcacttggtttggga

SEQ ID NO: 269461 - DNA, 25 bp, Probe sequence
ttgggaccaaggggtcgcaggttcg

SEQ ID NO: 269462 - DNA, 25 bp, Probe sequence
agagcacttggtttgggaccaaggg

SEQ ID NO: 269463 - DNA, 25 bp, Probe sequence
aggggtcgcaggttcgaatcctgtc

SEQ ID NO: 269464 - DNA, 25 bp, Probe sequence
agtagctcagcttggtagagcactt

SEQ ID NO: 269465 - DNA, 25 bp, Probe sequence
agctcagcttggtagagcacttggt

SEQ ID NO: 269466 - DNA, 25 bp, Probe sequence
aaggggtcgcaggttcgaatcctgt

SEQ ID NO: 269467 - DNA, 25 bp, Probe sequence
aagtagctcagcttggtagagcact

SEQ ID NO: 269468 - DNA, 25 bp, Probe sequence
caaggggtcgcaggttcgaatcctg

SEQ ID NO: 269469 - DNA, 25 bp, Probe sequence
cagcttggtagagcacttggtttgg

SEQ ID NO: 269470 - DNA, 25 bp, Probe sequence
ctcagcttggtagagcacttggttt

SEQ ID NO: 269471 - DNA, 25 bp, Probe sequence
cttggtagagcacttggtttgggac

SEQ ID NO: 269472 - DNA, 25 bp, Probe sequence
cgggaagtagctcagcttggtagag

SEQ ID NO: 269473 - DNA, 25 bp, Probe sequence
ccaaggggtcgcaggttcgaatcct

SEQ ID NO: 269474 - DNA, 25 bp, Probe sequence
gctcagcttggtagagcacttggtt

SEQ ID NO: 269475 - DNA, 25 bp, Probe sequence
gaagtagctcagcttggtagagcac

SEQ ID NO: 269476 - DNA, 25 bp, Probe sequence
gaccaaggggtcgcaggttcgaatc

SEQ ID NO: 269477 - DNA, 25 bp, Probe sequence
gagcacttggtttgggaccaagggg

SEQ ID NO: 269478 - DNA, 25 bp, Probe sequence
gtagagcacttggtttgggaccaag

SEQ ID NO: 269479 - DNA, 25 bp, Probe sequence
gtagctcagcttggtagagcacttg

SEQ ID NO: 269480 - DNA, 25 bp, Probe sequence
gtcgcaggttcgaatcctgtcttcc

SEQ ID NO: 269481 - DNA, 25 bp, Probe sequence
gggaagtagctcagcttggtagagc

SEQ ID NO: 269482 - DNA, 25 bp, Probe sequence
tgggaccaaggggtcgcaggttcga

SEQ ID NO: 269483 - DNA, 25 bp, Probe sequence
ggtcgcaggttcgaatcctgtcttc

SEQ ID NO: 269484 - DNA, 25 bp, Probe sequence
ggtagagcacttggtttgggaccaa

SEQ ID NO: 269485 - DNA, 25 bp, Probe sequence
ggaccaaggggtcgcaggttcgaat

SEQ ID NO: 269486 - DNA, 25 bp, Probe sequence
ggaagtagctcagcttggtagagca

SEQ ID NO: 269487 - DNA, 25 bp, Probe sequence
tggtagagcacttggtttgggacca

SEQ ID NO: 269488 - DNA, 25 bp, Probe sequence
tcagcttggtagagcacttggtttg

SEQ ID NO: 269489 - DNA, 25 bp, Probe sequence
tagctcagcttggtagagcacttgg

SEQ ID NO: 269490 - DNA, 25 bp, Probe sequence
ttggtagagcacttggtttgggacc

SEQ ID NO: 269491 - DNA, 25 bp, Probe sequence
actacggatcaagaggttatgggtt

SEQ ID NO: 269492 - DNA, 25 bp, Probe sequence
atcaagaggttatgggttcgactcc

SEQ ID NO: 269493 - DNA, 25 bp, Probe sequence
attggatagagcgtttgactacgga

SEQ ID NO: 269494 - DNA, 25 bp, Probe sequence
atagagcgtttgactacggatcaag

SEQ ID NO: 269495 - DNA, 25 bp, Probe sequence
agagcgtttgactacggatcaagag

SEQ ID NO: 269496 - DNA, 25 bp, Probe sequence
agaggttatgggttcgactcctatc

SEQ ID NO: 269497 - DNA, 25 bp, Probe sequence
agctcaattggatagagcgtttgac

SEQ ID NO: 269498 - DNA, 25 bp, Probe sequence
agcgtttgactacggatcaagaggt

SEQ ID NO: 269499 - DNA, 25 bp, Probe sequence
acggatcaagaggttatgggttcga

SEQ ID NO: 269500 - DNA, 25 bp, Probe sequence
aagaggttatgggttcgactcctat

SEQ ID NO: 269501 - DNA, 25 bp, Probe sequence
caagaggttatgggttcgactccta

SEQ ID NO: 269502 - DNA, 25 bp, Probe sequence
aattggatagagcgtttgactacgg

SEQ ID NO: 269503 - DNA, 25 bp, Probe sequence
caattggatagagcgtttgactacg

SEQ ID NO: 269504 - DNA, 25 bp, Probe sequence
ctacggatcaagaggttatgggttc

SEQ ID NO: 269505 - DNA, 25 bp, Probe sequence
cggatcaagaggttatgggttcgac

SEQ ID NO: 269506 - DNA, 25 bp, Probe sequence
cgcccgtagctcaattggatagagc

SEQ ID NO: 269507 - DNA, 25 bp, Probe sequence
cccgtagctcaattggatagagcgt

SEQ ID NO: 269508 - DNA, 25 bp, Probe sequence
gcccgtagctcaattggatagagcg

SEQ ID NO: 269509 - DNA, 25 bp, Probe sequence
gcgcccgtagctcaattggatagag

SEQ ID NO: 269510 - DNA, 25 bp, Probe sequence
gcgtttgactacggatcaagaggtt

SEQ ID NO: 269511 - DNA, 25 bp, Probe sequence
gctcaattggatagagcgtttgact

SEQ ID NO: 269512 - DNA, 25 bp, Probe sequence
gactacggatcaagaggttatgggt

SEQ ID NO: 269513 - DNA, 25 bp, Probe sequence
gagcgtttgactacggatcaagagg

SEQ ID NO: 269514 - DNA, 25 bp, Probe sequence
gaggttatgggttcgactcctatcg

SEQ ID NO: 269515 - DNA, 25 bp, Probe sequence
gatcaagaggttatgggttcgactc

SEQ ID NO: 269516 - DNA, 25 bp, Probe sequence
gatagagcgtttgactacggatcaa

SEQ ID NO: 269517 - DNA, 25 bp, Probe sequence
gtttgactacggatcaagaggttat

SEQ ID NO: 269518 - DNA, 25 bp, Probe sequence
ggatcaagaggttatgggttcgact

SEQ ID NO: 269519 - DNA, 25 bp, Probe sequence
ggatagagcgtttgactacggatca

SEQ ID NO: 269520 - DNA, 25 bp, Probe sequence
tggatagagcgtttgactacggatc

SEQ ID NO: 269521 - DNA, 25 bp, Probe sequence
tcaagaggttatgggttcgactcct

SEQ ID NO: 269522 - DNA, 25 bp, Probe sequence
tacggatcaagaggttatgggttcg

SEQ ID NO: 269523 - DNA, 25 bp, Probe sequence
tagagcgtttgactacggatcaaga

SEQ ID NO: 269524 - DNA, 25 bp, Probe sequence
ttggatagagcgtttgactacggat

SEQ ID NO: 269525 - DNA, 25 bp, Probe sequence
atcagagggtcagaggttcgaatcc

SEQ ID NO: 269526 - DNA, 25 bp, Probe sequence
atctgacttttaatcagagggtcag

SEQ ID NO: 269527 - DNA, 25 bp, Probe sequence
agggtcagaggttcgaatcctctat

SEQ ID NO: 269528 - DNA, 25 bp, Probe sequence
agaggttcgaatcctctatggctca

SEQ ID NO: 269529 - DNA, 25 bp, Probe sequence
agagggtcagaggttcgaatcctct

SEQ ID NO: 269530 - DNA, 25 bp, Probe sequence
agagcatctgacttttaatcagagg

SEQ ID NO: 269531 - DNA, 25 bp, Probe sequence
agcatctgacttttaatcagagggt

SEQ ID NO: 269532 - DNA, 25 bp, Probe sequence
acttttaatcagagggtcagaggtt

SEQ ID NO: 269533 - DNA, 25 bp, Probe sequence
cagagggtcagaggttcgaatcctc

SEQ ID NO: 269534 - DNA, 25 bp, Probe sequence
aatcagagggtcagaggttcgaatc

SEQ ID NO: 269535 - DNA, 25 bp, Probe sequence
cagaggttcgaatcctctatggctc

SEQ ID NO: 269536 - DNA, 25 bp, Probe sequence
catctgacttttaatcagagggtca

SEQ ID NO: 269537 - DNA, 25 bp, Probe sequence
cttttaatcagagggtcagaggttc

SEQ ID NO: 269538 - DNA, 25 bp, Probe sequence
ctgacttttaatcagagggtcagag

SEQ ID NO: 269539 - DNA, 25 bp, Probe sequence
gcatctgacttttaatcagagggtc

SEQ ID NO: 269540 - DNA, 25 bp, Probe sequence
gacttttaatcagagggtcagaggt

SEQ ID NO: 269541 - DNA, 25 bp, Probe sequence
gaggttcgaatcctctatggctcac

SEQ ID NO: 269542 - DNA, 25 bp, Probe sequence
gagcatctgacttttaatcagaggg

SEQ ID NO: 269543 - DNA, 25 bp, Probe sequence
gagggtcagaggttcgaatcctcta

SEQ ID NO: 269544 - DNA, 25 bp, Probe sequence
gtagagcatctgacttttaatcaga

SEQ ID NO: 269545 - DNA, 25 bp, Probe sequence
gtcagaggttcgaatcctctatggc

SEQ ID NO: 269546 - DNA, 25 bp, Probe sequence
gggtcagaggttcgaatcctctatg

SEQ ID NO: 269547 - DNA, 25 bp, Probe sequence
ggtcagaggttcgaatcctctatgg

SEQ ID NO: 269548 - DNA, 25 bp, Probe sequence
ggtagagcatctgacttttaatcag

SEQ ID NO: 269549 - DNA, 25 bp, Probe sequence
tggtagagcatctgacttttaatca

SEQ ID NO: 269550 - DNA, 25 bp, Probe sequence
tgacttttaatcagagggtcagagg

SEQ ID NO: 269551 - DNA, 25 bp, Probe sequence
tcagaggttcgaatcctctatggct

SEQ ID NO: 269552 - DNA, 25 bp, Probe sequence
tctgacttttaatcagagggtcaga

SEQ ID NO: 269553 - DNA, 25 bp, Probe sequence
tcagagggtcagaggttcgaatcct

SEQ ID NO: 269554 - DNA, 25 bp, Probe sequence
taatcagagggtcagaggttcgaat

SEQ ID NO: 269555 - DNA, 25 bp, Probe sequence
tagagcatctgacttttaatcagag

SEQ ID NO: 269556 - DNA, 25 bp, Probe sequence
tttaatcagagggtcagaggttcga

SEQ ID NO: 269557 - DNA, 25 bp, Probe sequence
ttttaatcagagggtcagaggttcg

SEQ ID NO: 269558 - DNA, 25 bp, Probe sequence
ttaatcagagggtcagaggttcgaa

SEQ ID NO: 269559 - DNA, 25 bp, Probe sequence
atctgccttacaagcagagggtcgg

SEQ ID NO: 269560 - DNA, 25 bp, Probe sequence
agagcatctgccttacaagcagagg

SEQ ID NO: 269561 - DNA, 25 bp, Probe sequence
agcatctgccttacaagcagagggt

SEQ ID NO: 269562 - DNA, 25 bp, Probe sequence
agctgggagagcatctgccttacaa

SEQ ID NO: 269563 - DNA, 25 bp, Probe sequence
acaagcagagggtcggcggttcgaa

SEQ ID NO: 269564 - DNA, 25 bp, Probe sequence
caagcagagggtcggcggttcgaac

SEQ ID NO: 269565 - DNA, 25 bp, Probe sequence
cttacaagcagagggtcggcggttc

SEQ ID NO: 269566 - DNA, 25 bp, Probe sequence
catctgccttacaagcagagggtcg

SEQ ID NO: 269567 - DNA, 25 bp, Probe sequence
ctgccttacaagcagagggtcggcg

SEQ ID NO: 269568 - DNA, 25 bp, Probe sequence
ctcagctgggagagcatctgcctta

SEQ ID NO: 269569 - DNA, 25 bp, Probe sequence
ctgggagagcatctgccttacaagc

SEQ ID NO: 269570 - DNA, 25 bp, Probe sequence
gccttacaagcagagggtcggcggt

SEQ ID NO: 269571 - DNA, 25 bp, Probe sequence
ccttacaagcagagggtcggcggtt

SEQ ID NO: 269572 - DNA, 25 bp, Probe sequence
gctgggagagcatctgccttacaag

SEQ ID NO: 269573 - DNA, 25 bp, Probe sequence
gcatctgccttacaagcagagggtc

SEQ ID NO: 269574 - DNA, 25 bp, Probe sequence
gagcatctgccttacaagcagaggg

SEQ ID NO: 269575 - DNA, 25 bp, Probe sequence
gagagcatctgccttacaagcagag

SEQ ID NO: 269576 - DNA, 25 bp, Probe sequence
gggagagcatctgccttacaagcag

SEQ ID NO: 269577 - DNA, 25 bp, Probe sequence
ggagagcatctgccttacaagcaga

SEQ ID NO: 269578 - DNA, 25 bp, Probe sequence
tgggagagcatctgccttacaagca

SEQ ID NO: 269579 - DNA, 25 bp, Probe sequence
tgccttacaagcagagggtcggcgg

SEQ ID NO: 269580 - DNA, 25 bp, Probe sequence
tacaagcagagggtcggcggttcga

SEQ ID NO: 269581 - DNA, 25 bp, Probe sequence
tctgccttacaagcagagggtcggc

SEQ ID NO: 269582 - DNA, 25 bp, Probe sequence
tcagctgggagagcatctgccttac

SEQ ID NO: 269583 - DNA, 25 bp, Probe sequence
ttacaagcagagggtcggcggttcg

SEQ ID NO: 269584 - DNA, 25 bp, Probe sequence
atagcaaggaggtcacacctgttcc

SEQ ID NO: 269585 - DNA, 25 bp, Probe sequence
atgccgaacacagaagttaagctcc

SEQ ID NO: 269586 - DNA, 25 bp, Probe sequence
atggtagtcgaacttacgttccgct

SEQ ID NO: 269587 - DNA, 25 bp, Probe sequence
agttaagctccttagcgtcgatggt

SEQ ID NO: 269588 - DNA, 25 bp, Probe sequence
agaagttaagctccttagcgtcgat

SEQ ID NO: 269589 - DNA, 25 bp, Probe sequence
agctccttagcgtcgatggtagtcg

SEQ ID NO: 269590 - DNA, 25 bp, Probe sequence
acagaagttaagctccttagcgtcg

SEQ ID NO: 269591 - DNA, 25 bp, Probe sequence
aacacagaagttaagctccttagcg

SEQ ID NO: 269592 - DNA, 25 bp, Probe sequence
aagctccttagcgtcgatggtagtc

SEQ ID NO: 269593 - DNA, 25 bp, Probe sequence
aagttaagctccttagcgtcgatgg

SEQ ID NO: 269594 - DNA, 25 bp, Probe sequence
cacagaagttaagctccttagcgtc

SEQ ID NO: 269595 - DNA, 25 bp, Probe sequence
cagaagttaagctccttagcgtcga

SEQ ID NO: 269596 - DNA, 25 bp, Probe sequence
cttagcgtcgatggtagtcgaactt

SEQ ID NO: 269597 - DNA, 25 bp, Probe sequence
ctccttagcgtcgatggtagtcgaa

SEQ ID NO: 269598 - DNA, 25 bp, Probe sequence
ctgttcccatgccgaacacagaagt

SEQ ID NO: 269599 - DNA, 25 bp, Probe sequence
ccgaacacagaagttaagctcctta

SEQ ID NO: 269600 - DNA, 25 bp, Probe sequence
cccatgccgaacacagaagttaagc

SEQ ID NO: 269601 - DNA, 25 bp, Probe sequence
cctgttcccatgccgaacacagaag

SEQ ID NO: 269602 - DNA, 25 bp, Probe sequence
ccttagcgtcgatggtagtcgaact

SEQ ID NO: 269603 - DNA, 25 bp, Probe sequence
gccgaacacagaagttaagctcctt

SEQ ID NO: 269604 - DNA, 25 bp, Probe sequence
gcgtcgatggtagtcgaacttacgt

SEQ ID NO: 269605 - DNA, 25 bp, Probe sequence
gctccttagcgtcgatggtagtcga

SEQ ID NO: 269606 - DNA, 25 bp, Probe sequence
gaagttaagctccttagcgtcgatg

SEQ ID NO: 269607 - DNA, 25 bp, Probe sequence
gaacacagaagttaagctccttagc

SEQ ID NO: 269608 - DNA, 25 bp, Probe sequence
gttcccatgccgaacacagaagtta

SEQ ID NO: 269609 - DNA, 25 bp, Probe sequence
gttaagctccttagcgtcgatggta

SEQ ID NO: 269610 - DNA, 25 bp, Probe sequence
gtcgatggtagtcgaacttacgttc

SEQ ID NO: 269611 - DNA, 25 bp, Probe sequence
tccttagcgtcgatggtagtcgaac

SEQ ID NO: 269612 - DNA, 25 bp, Probe sequence
tcccatgccgaacacagaagttaag

SEQ ID NO: 269613 - DNA, 25 bp, Probe sequence
taagctccttagcgtcgatggtagt

SEQ ID NO: 269614 - DNA, 25 bp, Probe sequence
tagcgtcgatggtagtcgaacttac

SEQ ID NO: 269615 - DNA, 25 bp, Probe sequence
tagcaaggaggtcacacctgttccc

SEQ ID NO: 269616 - DNA, 25 bp, Probe sequence
ttcccatgccgaacacagaagttaa

SEQ ID NO: 269617 - DNA, 25 bp, Probe sequence
ttaagctccttagcgtcgatggtag

SEQ ID NO: 269618 - DNA, 25 bp, Probe sequence
cgtgaggtcggtggttcgagtccac

SEQ ID NO: 269619 - DNA, 25 bp, Probe sequence
aggtcggtggttcgagtccacttag

SEQ ID NO: 269620 - DNA, 25 bp, Probe sequence
atagctcagctggttagagcgcacg

SEQ ID NO: 269621 - DNA, 25 bp, Probe sequence
ataagcgtgaggtcggtggttcgag

SEQ ID NO: 269622 - DNA, 25 bp, Probe sequence
agagcgcacgcctgataagcgtgag

SEQ ID NO: 269623 - DNA, 25 bp, Probe sequence
agctcagctggttagagcgcacgcc

SEQ ID NO: 269624 - DNA, 25 bp, Probe sequence
aagcgtgaggtcggtggttcgagtc

SEQ ID NO: 269625 - DNA, 25 bp, Probe sequence
ctgataagcgtgaggtcggtggttc

SEQ ID NO: 269626 - DNA, 25 bp, Probe sequence
ctggttagagcgcacgcctgataag

SEQ ID NO: 269627 - DNA, 25 bp, Probe sequence
cgcctgataagcgtgaggtcggtgg

SEQ ID NO: 269628 - DNA, 25 bp, Probe sequence
cctatagctcagctggttagagcgc

SEQ ID NO: 269629 - DNA, 25 bp, Probe sequence
gcctgataagcgtgaggtcggtggt

SEQ ID NO: 269630 - DNA, 25 bp, Probe sequence
gcctatagctcagctggttagagcg

SEQ ID NO: 269631 - DNA, 25 bp, Probe sequence
gcgcacgcctgataagcgtgaggtc

SEQ ID NO: 269632 - DNA, 25 bp, Probe sequence
gctggttagagcgcacgcctgataa

SEQ ID NO: 269633 - DNA, 25 bp, Probe sequence
gctcagctggttagagcgcacgcct

SEQ ID NO: 269634 - DNA, 25 bp, Probe sequence
gcacgcctgataagcgtgaggtcgg

SEQ ID NO: 269635 - DNA, 25 bp, Probe sequence
gtgaggtcggtggttcgagtccact

SEQ ID NO: 269636 - DNA, 25 bp, Probe sequence
gagcgcacgcctgataagcgtgagg

SEQ ID NO: 269637 - DNA, 25 bp, Probe sequence
gggcctatagctcagctggttagag

SEQ ID NO: 269638 - DNA, 25 bp, Probe sequence
gataagcgtgaggtcggtggttcga

SEQ ID NO: 269639 - DNA, 25 bp, Probe sequence
gtcggtggttcgagtccacttaggc

SEQ ID NO: 269640 - DNA, 25 bp, Probe sequence
gttagagcgcacgcctgataagcgt

SEQ ID NO: 269641 - DNA, 25 bp, Probe sequence
ggttagagcgcacgcctgataagcg

SEQ ID NO: 269642 - DNA, 25 bp, Probe sequence
ggcctatagctcagctggttagagc

SEQ ID NO: 269643 - DNA, 25 bp, Probe sequence
tggttagagcgcacgcctgataagc

SEQ ID NO: 269644 - DNA, 25 bp, Probe sequence
tgataagcgtgaggtcggtggttcg

SEQ ID NO: 269645 - DNA, 25 bp, Probe sequence
tgaggtcggtggttcgagtccactt

SEQ ID NO: 269646 - DNA, 25 bp, Probe sequence
tcggtggttcgagtccacttaggcc

SEQ ID NO: 269647 - DNA, 25 bp, Probe sequence
tcagctggttagagcgcacgcctga

SEQ ID NO: 269648 - DNA, 25 bp, Probe sequence
taagcgtgaggtcggtggttcgagt

SEQ ID NO: 269649 - DNA, 25 bp, Probe sequence
tagctcagctggttagagcgcacgc

SEQ ID NO: 269650 - DNA, 25 bp, Probe sequence
tagagcgcacgcctgataagcgtga

SEQ ID NO: 269651 - DNA, 25 bp, Probe sequence
tatagctcagctggttagagcgcac

SEQ ID NO: 269652 - DNA, 25 bp, Probe sequence
ctggtagtccacgccgtaaacgatg

SEQ ID NO: 269653 - DNA, 25 bp, Probe sequence
gtccagactcctacgggaggcagca

SEQ ID NO: 269654 - DNA, 25 bp, Probe sequence
attgacggggacccgcacaagcggt

SEQ ID NO: 269655 - DNA, 25 bp, Probe sequence
aagccacggctaactacgtgccagc

SEQ ID NO: 269656 - DNA, 25 bp, Probe sequence
acggctcaaccgtggagggtcattg

SEQ ID NO: 269657 - DNA, 25 bp, Probe sequence
atccgcgctgcattagctagttggt

SEQ ID NO: 269658 - DNA, 25 bp, Probe sequence
agtctgatgtgaaagcccacggctc

SEQ ID NO: 269659 - DNA, 25 bp, Probe sequence
aacgatgcatagccgacctgagagg

SEQ ID NO: 269660 - DNA, 25 bp, Probe sequence
aactgtgcacatcttgacggtacct

SEQ ID NO: 269661 - DNA, 25 bp, Probe sequence
aacgagcgcaacccttaagcttagt

SEQ ID NO: 269662 - DNA, 25 bp, Probe sequence
gaaggcgactttctggtctgtaact

SEQ ID NO: 269663 - DNA, 25 bp, Probe sequence
cggaaggtgcggctggatcacctcc

SEQ ID NO: 269664 - DNA, 25 bp, Probe sequence
caggtggtgcatggttgtcgtcagc

SEQ ID NO: 269665 - DNA, 25 bp, Probe sequence
ctggctcaggatgaacgctggcggc

SEQ ID NO: 269666 - DNA, 25 bp, Probe sequence
gcctggggagtacgaccgcaaggtt

SEQ ID NO: 269667 - DNA, 25 bp, Probe sequence
cgtcaaatcatcatgccccttatga

SEQ ID NO: 269668 - DNA, 25 bp, Probe sequence
ccagcagccgcggtaatacgtaggt

SEQ ID NO: 269669 - DNA, 25 bp, Probe sequence
gcgcgtaggcggttttttaagtctg

SEQ ID NO: 269670 - DNA, 25 bp, Probe sequence
gcttgcttctctgatgttagcggcg

SEQ ID NO: 269671 - DNA, 25 bp, Probe sequence
gcagctaacgcattaagcactccgc

SEQ ID NO: 269672 - DNA, 25 bp, Probe sequence
gcactctaagttgactgccggtgac

SEQ ID NO: 269673 - DNA, 25 bp, Probe sequence
gaaccttaccaaatcttgacatcct

SEQ ID NO: 269674 - DNA, 25 bp, Probe sequence
gacggagcaacgccgcgtgagtgat

SEQ ID NO: 269675 - DNA, 25 bp, Probe sequence
gacggtcttgctgtcacttatagat

SEQ ID NO: 269676 - DNA, 25 bp, Probe sequence
gaggcagcagtagggaatcttccgc

SEQ ID NO: 269677 - DNA, 25 bp, Probe sequence
gatttgggctacacacgtgctacaa

SEQ ID NO: 269678 - DNA, 25 bp, Probe sequence
gttgttctcagttcggattgtagtc

SEQ ID NO: 269679 - DNA, 25 bp, Probe sequence
gtaggtggcaagcgttatccggaat

SEQ ID NO: 269680 - DNA, 25 bp, Probe sequence
gtcgtcagctcgtgtcgtgagatgt

SEQ ID NO: 269681 - DNA, 25 bp, Probe sequence
gtgatcggccacactggaactgaga

SEQ ID NO: 269682 - DNA, 25 bp, Probe sequence
tgggttaagtcccgcaacgagcgca

SEQ ID NO: 269683 - DNA, 25 bp, Probe sequence
ggaactgagacacggtccagactcc

SEQ ID NO: 269684 - DNA, 25 bp, Probe sequence
tgctacggtgaatacgttcccgggt

SEQ ID NO: 269685 - DNA, 25 bp, Probe sequence
taaccttttaggagctagccgtcga

SEQ ID NO: 269686 - DNA, 25 bp, Probe sequence
atcatagtcggcgtagtttcgttaa

SEQ ID NO: 269687 - DNA, 25 bp, Probe sequence
ttatgcaacttgggcgggactaggt

SEQ ID NO: 269688 - DNA, 25 bp, Probe sequence
cttaacaaccgtagtctcaataatt

SEQ ID NO: 269689 - DNA, 25 bp, Probe sequence
atttataccatccttaggaacaata

SEQ ID NO: 269690 - DNA, 25 bp, Probe sequence
atttcatttggaatttgtttctatt

SEQ ID NO: 269691 - DNA, 25 bp, Probe sequence
atagttttaatcatagtcggcgtag

SEQ ID NO: 269692 - DNA, 25 bp, Probe sequence
ataacttatgcaacttgggcgggac

SEQ ID NO: 269693 - DNA, 25 bp, Probe sequence
atgcaacttgggcgggactaggttt

SEQ ID NO: 269694 - DNA, 25 bp, Probe sequence
acaatgcaacacctaccactaaata

SEQ ID NO: 269695 - DNA, 25 bp, Probe sequence
aaatctaataactatagtatctata

SEQ ID NO: 269696 - DNA, 25 bp, Probe sequence
aacttatgcaacttgggcgggacta

SEQ ID NO: 269697 - DNA, 25 bp, Probe sequence
aaacattttcggaacatcgcattaa

SEQ ID NO: 269698 - DNA, 25 bp, Probe sequence
aaaacaatgcaacacctaccactaa

SEQ ID NO: 269699 - DNA, 25 bp, Probe sequence
aacaaccgtagtctcaataattatt

SEQ ID NO: 269700 - DNA, 25 bp, Probe sequence
aacaatgcaacacctaccactaaat

SEQ ID NO: 269701 - DNA, 25 bp, Probe sequence
gcaacttgggcgggactaggtttag

SEQ ID NO: 269702 - DNA, 25 bp, Probe sequence
aatgcaacacctaccactaaatata

SEQ ID NO: 269703 - DNA, 25 bp, Probe sequence
caaccgtagtctcaataattatttt

SEQ ID NO: 269704 - DNA, 25 bp, Probe sequence
caacacctaccactaaatataactt

SEQ ID NO: 269705 - DNA, 25 bp, Probe sequence
cacctaccactaaatataacttatg

SEQ ID NO: 269706 - DNA, 25 bp, Probe sequence
ccatccttaggaacaataatttcat

SEQ ID NO: 269707 - DNA, 25 bp, Probe sequence
gcaacacctaccactaaatataact

SEQ ID NO: 269708 - DNA, 25 bp, Probe sequence
gttttaatcatagtcggcgtagttt

SEQ ID NO: 269709 - DNA, 25 bp, Probe sequence
gtagtctcaataattattttcaaag

SEQ ID NO: 269710 - DNA, 25 bp, Probe sequence
gtaaaacaatgcaacacctaccact

SEQ ID NO: 269711 - DNA, 25 bp, Probe sequence
gtcttaacaaccgtagtctcaataa

SEQ ID NO: 269712 - DNA, 25 bp, Probe sequence
tcgttaaacattttcggaacatcgc

SEQ ID NO: 269713 - DNA, 25 bp, Probe sequence
tcatagtcggcgtagtttcgttaaa

SEQ ID NO: 269714 - DNA, 25 bp, Probe sequence
tcatttggaatttgtttctattttt

SEQ ID NO: 269715 - DNA, 25 bp, Probe sequence
tagtcggcgtagtttcgttaaacat

SEQ ID NO: 269716 - DNA, 25 bp, Probe sequence
taatcatagtcggcgtagtttcgtt

SEQ ID NO: 269717 - DNA, 25 bp, Probe sequence
tagtcttaacaaccgtagtctcaat

SEQ ID NO: 269718 - DNA, 25 bp, Probe sequence
tatagtatctatagttttaatcata

SEQ ID NO: 269719 - DNA, 25 bp, Probe sequence
tttagtcttaacaaccgtagtctca

SEQ ID NO: 269720 - DNA, 25 bp, Probe sequence
agtggaaacttggtggcgatggtat

SEQ ID NO: 269721 - DNA, 25 bp, Probe sequence
agcagcaggattttcaacaaaagaa

SEQ ID NO: 269722 - DNA, 25 bp, Probe sequence
cacgttggtaaacaatatacctacg

SEQ ID NO: 269723 - DNA, 25 bp, Probe sequence
aacttggtggcgatggtatcgaaat

SEQ ID NO: 269724 - DNA, 25 bp, Probe sequence
aaagttatagattttcacaacacgt

SEQ ID NO: 269725 - DNA, 25 bp, Probe sequence
aaagcagcaggattttcaacaaaag

SEQ ID NO: 269726 - DNA, 25 bp, Probe sequence
aaagcagttgaaatgaaagcagcag

SEQ ID NO: 269727 - DNA, 25 bp, Probe sequence
aagttatagattttcacaacacgtt

SEQ ID NO: 269728 - DNA, 25 bp, Probe sequence
aagtggaaacttggtggcgatggta

SEQ ID NO: 269729 - DNA, 25 bp, Probe sequence
aaggattagaagagctgtcagaagt

SEQ ID NO: 269730 - DNA, 25 bp, Probe sequence
caaggcattggaaaggaagtggtac

SEQ ID NO: 269731 - DNA, 25 bp, Probe sequence
cacaacacgttggtaaacaatatac

SEQ ID NO: 269732 - DNA, 25 bp, Probe sequence
cttggtggcgatggtatcgaaatgg

SEQ ID NO: 269733 - DNA, 25 bp, Probe sequence
gcgatggtatcgaaatggggaaagt

SEQ ID NO: 269734 - DNA, 25 bp, Probe sequence
gcagttgaaatgaaagcagcaggat

SEQ ID NO: 269735 - DNA, 25 bp, Probe sequence
gaacacaagtggaaacttggtggcg

SEQ ID NO: 269736 - DNA, 25 bp, Probe sequence
gaaaagagtttcttattcagtagaa

SEQ ID NO: 269737 - DNA, 25 bp, Probe sequence
gaaacttggtggcgatggtatcgaa

SEQ ID NO: 269738 - DNA, 25 bp, Probe sequence
gatggtatcgaaatggggaaagtta

SEQ ID NO: 269739 - DNA, 25 bp, Probe sequence
gattttcacaacacgttggtaaaca

SEQ ID NO: 269740 - DNA, 25 bp, Probe sequence
gttatagattttcacaacacgttgg

SEQ ID NO: 269741 - DNA, 25 bp, Probe sequence
gtggaaacttggtggcgatggtatc

SEQ ID NO: 269742 - DNA, 25 bp, Probe sequence
ggtggcgatggtatcgaaatgggga

SEQ ID NO: 269743 - DNA, 25 bp, Probe sequence
ggaaacttggtggcgatggtatcga

SEQ ID NO: 269744 - DNA, 25 bp, Probe sequence
ggtaaaggattagaagagctgtcag

SEQ ID NO: 269745 - DNA, 25 bp, Probe sequence
ggtatcgaaatggggaaagttatag

SEQ ID NO: 269746 - DNA, 25 bp, Probe sequence
tggaaaggaagtggtaccaacagta

SEQ ID NO: 269747 - DNA, 25 bp, Probe sequence
tggaaacttggtggcgatggtatcg

SEQ ID NO: 269748 - DNA, 25 bp, Probe sequence
tatacctacggtaaaggattagaag

SEQ ID NO: 269749 - DNA, 25 bp, Probe sequence
tagattttcacaacacgttggtaaa

SEQ ID NO: 269750 - DNA, 25 bp, Probe sequence
tatagattttcacaacacgttggta

SEQ ID NO: 269751 - DNA, 25 bp, Probe sequence
tattttaaaaaagtacaaggcattg

SEQ ID NO: 269752 - DNA, 25 bp, Probe sequence
ttttcacaacacgttggtaaacaat

SEQ ID NO: 269753 - DNA, 25 bp, Probe sequence
ttatagattttcacaacacgttggt

SEQ ID NO: 269754 - DNA, 25 bp, Probe sequence
attcacaaacaaactggcgtagcgc

SEQ ID NO: 269755 - DNA, 25 bp, Probe sequence
atacagttacgcacgacaagtgtta

SEQ ID NO: 269756 - DNA, 25 bp, Probe sequence
agcgcaatatgtaatttcacaatta

SEQ ID NO: 269757 - DNA, 25 bp, Probe sequence
actatacagttacgcacgacaagtg

SEQ ID NO: 269758 - DNA, 25 bp, Probe sequence
acagttacgcacgacaagtgttata

SEQ ID NO: 269759 - DNA, 25 bp, Probe sequence
acaaactggcgtagcgcaatatgta

SEQ ID NO: 269760 - DNA, 25 bp, Probe sequence
aaattcacaaacaaactggcgtagc

SEQ ID NO: 269761 - DNA, 25 bp, Probe sequence
aaactggcgtagcgcaatatgtaat

SEQ ID NO: 269762 - DNA, 25 bp, Probe sequence
aaactatacagttacgcacgacaag

SEQ ID NO: 269763 - DNA, 25 bp, Probe sequence
aaaactatacagttacgcacgacaa

SEQ ID NO: 269764 - DNA, 25 bp, Probe sequence
aacaaactggcgtagcgcaatatgt

SEQ ID NO: 269765 - DNA, 25 bp, Probe sequence
aactatacagttacgcacgacaagt

SEQ ID NO: 269766 - DNA, 25 bp, Probe sequence
caaggaaagcgcgaagtagataact

SEQ ID NO: 269767 - DNA, 25 bp, Probe sequence
aattcacaaacaaactggcgtagcg

SEQ ID NO: 269768 - DNA, 25 bp, Probe sequence
caaacaaactggcgtagcgcaatat

SEQ ID NO: 269769 - DNA, 25 bp, Probe sequence
cacaaacaaactggcgtagcgcaat

SEQ ID NO: 269770 - DNA, 25 bp, Probe sequence
cagttacgcacgacaagtgttataa

SEQ ID NO: 269771 - DNA, 25 bp, Probe sequence
ctatacagttacgcacgacaagtgt

SEQ ID NO: 269772 - DNA, 25 bp, Probe sequence
ctggcgtagcgcaatatgtaatttc

SEQ ID NO: 269773 - DNA, 25 bp, Probe sequence
gcgcgaagtagataacttaacttta

SEQ ID NO: 269774 - DNA, 25 bp, Probe sequence
gcgtagcgcaatatgtaatttcaca

SEQ ID NO: 269775 - DNA, 25 bp, Probe sequence
gaaaaactatacagttacgcacgac

SEQ ID NO: 269776 - DNA, 25 bp, Probe sequence
gaaagcgcgaagtagataacttaac

SEQ ID NO: 269777 - DNA, 25 bp, Probe sequence
gataacttaactttaaatacaactg

SEQ ID NO: 269778 - DNA, 25 bp, Probe sequence
gatataacaggttaccaaattcaca

SEQ ID NO: 269779 - DNA, 25 bp, Probe sequence
gtagcgcaatatgtaatttcacaat

SEQ ID NO: 269780 - DNA, 25 bp, Probe sequence
ggttaccaaattcacaaacaaactg

SEQ ID NO: 269781 - DNA, 25 bp, Probe sequence
ggcgtagcgcaatatgtaatttcac

SEQ ID NO: 269782 - DNA, 25 bp, Probe sequence
tcacaaacaaactggcgtagcgcaa

SEQ ID NO: 269783 - DNA, 25 bp, Probe sequence
tcaaaagtgatataacaggttacca

SEQ ID NO: 269784 - DNA, 25 bp, Probe sequence
taacaggttaccaaattcacaaaca

SEQ ID NO: 269785 - DNA, 25 bp, Probe sequence
tacagttacgcacgacaagtgttat

SEQ ID NO: 269786 - DNA, 25 bp, Probe sequence
tatacagttacgcacgacaagtgtt

SEQ ID NO: 269787 - DNA, 25 bp, Probe sequence
ttcacaaacaaactggcgtagcgca

SEQ ID NO: 269788 - DNA, 25 bp, Probe sequence
attcaggatctccgacattgaccat

SEQ ID NO: 269789 - DNA, 25 bp, Probe sequence
atatcaactttagtaatccttcagg

SEQ ID NO: 269790 - DNA, 25 bp, Probe sequence
ataaatatccggatagcatagaaga

SEQ ID NO: 269791 - DNA, 25 bp, Probe sequence
atcaggagtcaatagcggagttgca

SEQ ID NO: 269792 - DNA, 25 bp, Probe sequence
atcaactttagtaatccttcaggga

SEQ ID NO: 269793 - DNA, 25 bp, Probe sequence
atctccgacattgaccattgaataa

SEQ ID NO: 269794 - DNA, 25 bp, Probe sequence
atgtttattcaggatctccgacatt

SEQ ID NO: 269795 - DNA, 25 bp, Probe sequence
atggaaaaagccttcatcttttgta

SEQ ID NO: 269796 - DNA, 25 bp, Probe sequence
agcggagttgcaagtaaaaatatca

SEQ ID NO: 269797 - DNA, 25 bp, Probe sequence
aaatatcaactttagtaatccttca

SEQ ID NO: 269798 - DNA, 25 bp, Probe sequence
aaatgtacgtagcggtataatgagg

SEQ ID NO: 269799 - DNA, 25 bp, Probe sequence
aaaagttatcaggtgacaatagaaa

SEQ ID NO: 269800 - DNA, 25 bp, Probe sequence
aagtgatgtttattcaggatctccg

SEQ ID NO: 269801 - DNA, 25 bp, Probe sequence
aatggacaataaatggagttgaacc

SEQ ID NO: 269802 - DNA, 25 bp, Probe sequence
caggagtcaatagcggagttgcaag

SEQ ID NO: 269803 - DNA, 25 bp, Probe sequence
gaaaatgtacgtagcggtataatga

SEQ ID NO: 269804 - DNA, 25 bp, Probe sequence
gaaaaagccttcatcttttgtaata

SEQ ID NO: 269805 - DNA, 25 bp, Probe sequence
gacaatagaaaatgtacgtagcggt

SEQ ID NO: 269806 - DNA, 25 bp, Probe sequence
gatgtttattcaggatctccgacat

SEQ ID NO: 269807 - DNA, 25 bp, Probe sequence
gatctccgacattgaccattgaata

SEQ ID NO: 269808 - DNA, 25 bp, Probe sequence
gtttattcaggatctccgacattga

SEQ ID NO: 269809 - DNA, 25 bp, Probe sequence
gtcaatagcggagttgcaagtaaaa

SEQ ID NO: 269810 - DNA, 25 bp, Probe sequence
gtgatgtttattcaggatctccgac

SEQ ID NO: 269811 - DNA, 25 bp, Probe sequence
ggagtcaatagcggagttgcaagta

SEQ ID NO: 269812 - DNA, 25 bp, Probe sequence
ggatctccgacattgaccattgaat

SEQ ID NO: 269813 - DNA, 25 bp, Probe sequence
ggaatatcaggagtcaatagcggag

SEQ ID NO: 269814 - DNA, 25 bp, Probe sequence
tttcgcaaactaatttagggtcaag

SEQ ID NO: 269815 - DNA, 25 bp, Probe sequence
tgatgtttattcaggatctccgaca

SEQ ID NO: 269816 - DNA, 25 bp, Probe sequence
tcaggatctccgacattgaccattg

SEQ ID NO: 269817 - DNA, 25 bp, Probe sequence
tcaacagcaaaatggacaataaatg

SEQ ID NO: 269818 - DNA, 25 bp, Probe sequence
tattcaggatctccgacattgacca

SEQ ID NO: 269819 - DNA, 25 bp, Probe sequence
tttattcaggatctccgacattgac

SEQ ID NO: 269820 - DNA, 25 bp, Probe sequence
ttattcaggatctccgacattgacc

SEQ ID NO: 269821 - DNA, 25 bp, Probe sequence
ttcaggatctccgacattgaccatt

SEQ ID NO: 269822 - DNA, 25 bp, Probe sequence
ataaaaatcatagtcatacaatcaa

SEQ ID NO: 269823 - DNA, 25 bp, Probe sequence
atcacagtcatgatgaacgttatct

SEQ ID NO: 269824 - DNA, 25 bp, Probe sequence
atcagacataaatcacagtcatgat

SEQ ID NO: 269825 - DNA, 25 bp, Probe sequence
acgttatcttttatcatcaaatgct

SEQ ID NO: 269826 - DNA, 25 bp, Probe sequence
acagtcatgatgaacgttatctttt

SEQ ID NO: 269827 - DNA, 25 bp, Probe sequence
aaatcagacataaatcacagtcatg

SEQ ID NO: 269828 - DNA, 25 bp, Probe sequence
aaatcacagtcatgatgaacgttat

SEQ ID NO: 269829 - DNA, 25 bp, Probe sequence
aaagaggaagcagataaactttatc

SEQ ID NO: 269830 - DNA, 25 bp, Probe sequence
aacgttatcttttatcatcaaatgc

SEQ ID NO: 269831 - DNA, 25 bp, Probe sequence
aatgctttatcaaaaaaatcagaca

SEQ ID NO: 269832 - DNA, 25 bp, Probe sequence
cagataaaaatcatagtcatacaat

SEQ ID NO: 269833 - DNA, 25 bp, Probe sequence
cagtcatgatgaacgttatctttta

SEQ ID NO: 269834 - DNA, 25 bp, Probe sequence
cttcgcagccgtcactgaatatttg

SEQ ID NO: 269835 - DNA, 25 bp, Probe sequence
cgttatcttttatcatcaaatgctt

SEQ ID NO: 269836 - DNA, 25 bp, Probe sequence
cgcagccgtcactgaatatttggac

SEQ ID NO: 269837 - DNA, 25 bp, Probe sequence
gaacgttatcttttatcatcaaatg

SEQ ID NO: 269838 - DNA, 25 bp, Probe sequence
gaaacagaatataattatttgtatc

SEQ ID NO: 269839 - DNA, 25 bp, Probe sequence
gacataaatcacagtcatgatgaac

SEQ ID NO: 269840 - DNA, 25 bp, Probe sequence
gattttgagggattcaagcaatcat

SEQ ID NO: 269841 - DNA, 25 bp, Probe sequence
gttatcttttatcatcaaatgcttt

SEQ ID NO: 269842 - DNA, 25 bp, Probe sequence
gtatcaaaaagaccctaatacactt

SEQ ID NO: 269843 - DNA, 25 bp, Probe sequence
gtcatgatgaacgttatcttttatc

SEQ ID NO: 269844 - DNA, 25 bp, Probe sequence
tcgcagccgtcactgaatatttgga

SEQ ID NO: 269845 - DNA, 25 bp, Probe sequence
tcttcgcagccgtcactgaatattt

SEQ ID NO: 269846 - DNA, 25 bp, Probe sequence
tcttttatcatcaaatgcttttaca

SEQ ID NO: 269847 - DNA, 25 bp, Probe sequence
tatcaaaaagaccctaatacacttt

SEQ ID NO: 269848 - DNA, 25 bp, Probe sequence
tatcttttatcatcaaatgctttta

SEQ ID NO: 269849 - DNA, 25 bp, Probe sequence
tatcatcaaatgcttttacaaaaga

SEQ ID NO: 269850 - DNA, 25 bp, Probe sequence
tatttgtatcaaaaagaccctaata

SEQ ID NO: 269851 - DNA, 25 bp, Probe sequence
ttttatcatcaaatgcttttacaaa

SEQ ID NO: 269852 - DNA, 25 bp, Probe sequence
ttcgcagccgtcactgaatatttgg

SEQ ID NO: 269853 - DNA, 25 bp, Probe sequence
ttcttcgcagccgtcactgaatatt

SEQ ID NO: 269854 - DNA, 25 bp, Probe sequence
ttgaaggattagaaaatgctttatc

SEQ ID NO: 269855 - DNA, 25 bp, Probe sequence
ttgagggattcaagcaatcattaaa

SEQ ID NO: 269856 - DNA, 25 bp, Probe sequence
atatatcaaaaagacccgaatacgt

SEQ ID NO: 269857 - DNA, 25 bp, Probe sequence
atatcaactaaaaagcgcatctcaa

SEQ ID NO: 269858 - DNA, 25 bp, Probe sequence
atctcaagcttttactaaacaacaa

SEQ ID NO: 269859 - DNA, 25 bp, Probe sequence
atgttttgtcatctcaagcttttac

SEQ ID NO: 269860 - DNA, 25 bp, Probe sequence
agcttttactaaacaacaagcggat

SEQ ID NO: 269861 - DNA, 25 bp, Probe sequence
agcagaacctgagttattggacaaa

SEQ ID NO: 269862 - DNA, 25 bp, Probe sequence
actaaatgatttatatgctccaaaa

SEQ ID NO: 269863 - DNA, 25 bp, Probe sequence
acatgtcgcaaacttttctttcaat

SEQ ID NO: 269864 - DNA, 25 bp, Probe sequence
acacgctggttatgttcgctgtaag

SEQ ID NO: 269865 - DNA, 25 bp, Probe sequence
acaagcggataatttatatcaacta

SEQ ID NO: 269866 - DNA, 25 bp, Probe sequence
aaatacatgtcgcaaacttttcttt

SEQ ID NO: 269867 - DNA, 25 bp, Probe sequence
aaaaagcgcatctcaaccgacggtt

SEQ ID NO: 269868 - DNA, 25 bp, Probe sequence
aagcgcatctcaaccgacggttaaa

SEQ ID NO: 269869 - DNA, 25 bp, Probe sequence
caatcctgacactaaaatgtggcaa

SEQ ID NO: 269870 - DNA, 25 bp, Probe sequence
cgagcggtatgttttgtcatctcaa

SEQ ID NO: 269871 - DNA, 25 bp, Probe sequence
gcgcatctcaaccgacggttaaaat

SEQ ID NO: 269872 - DNA, 25 bp, Probe sequence
gcggtatgttttgtcatctcaagct

SEQ ID NO: 269873 - DNA, 25 bp, Probe sequence
gctggttatgttcgctgtaagctgt

SEQ ID NO: 269874 - DNA, 25 bp, Probe sequence
gaaccgggacaacctggagcaaaag

SEQ ID NO: 269875 - DNA, 25 bp, Probe sequence
gaacctgagttattggacaaaatca

SEQ ID NO: 269876 - DNA, 25 bp, Probe sequence
gacaacctggagcaaaaggtgaagc

SEQ ID NO: 269877 - DNA, 25 bp, Probe sequence
gacgagcggtatgttttgtcatctc

SEQ ID NO: 269878 - DNA, 25 bp, Probe sequence
gaggaattcaaacaaacactaaatg

SEQ ID NO: 269879 - DNA, 25 bp, Probe sequence
gttttgtcatctcaagcttttacta

SEQ ID NO: 269880 - DNA, 25 bp, Probe sequence
gtcatctcaagcttttactaaacaa

SEQ ID NO: 269881 - DNA, 25 bp, Probe sequence
gtgaaccgggacaacctggagcaaa

SEQ ID NO: 269882 - DNA, 25 bp, Probe sequence
ggtgaaccgggacaacctggagcaa

SEQ ID NO: 269883 - DNA, 25 bp, Probe sequence
ggtatgttttgtcatctcaagcttt

SEQ ID NO: 269884 - DNA, 25 bp, Probe sequence
tgctccaaaaaatcataatcatgac

SEQ ID NO: 269885 - DNA, 25 bp, Probe sequence
tcaaaaagacccgaatacgttatat

SEQ ID NO: 269886 - DNA, 25 bp, Probe sequence
taatcatgacgagcggtatgttttg

SEQ ID NO: 269887 - DNA, 25 bp, Probe sequence
tacatgtcgcaaacttttctttcaa

SEQ ID NO: 269888 - DNA, 25 bp, Probe sequence
ttatgttcgctgtaagctgttttta

SEQ ID NO: 269889 - DNA, 25 bp, Probe sequence
ttgtcatctcaagcttttactaaac

SEQ ID NO: 269890 - DNA, 25 bp, Probe sequence
atttaatcgcgcatgctttcttaga

SEQ ID NO: 269891 - DNA, 25 bp, Probe sequence
atttgggcacctagaagagctgtat

SEQ ID NO: 269892 - DNA, 25 bp, Probe sequence
atccagacaaaactacaccggcacc

SEQ ID NO: 269893 - DNA, 25 bp, Probe sequence
agaaacgcacaaacgatgagctcgg

SEQ ID NO: 269894 - DNA, 25 bp, Probe sequence
acagccaacaatggttcggcatcta

SEQ ID NO: 269895 - DNA, 25 bp, Probe sequence
acaccggcacctaaaccagaagatg

SEQ ID NO: 269896 - DNA, 25 bp, Probe sequence
aaacgagtccttatacattcaaaca

SEQ ID NO: 269897 - DNA, 25 bp, Probe sequence
aacactcttatcatgatggaccagg

SEQ ID NO: 269898 - DNA, 25 bp, Probe sequence
aacaatcctaactacgcaatgacgt

SEQ ID NO: 269899 - DNA, 25 bp, Probe sequence
aacgcaacaggaagtccaccttata

SEQ ID NO: 269900 - DNA, 25 bp, Probe sequence
aaggtgtttcagttagcgcacttaa

SEQ ID NO: 269901 - DNA, 25 bp, Probe sequence
aatgcttggggttgggctaacgcta

SEQ ID NO: 269902 - DNA, 25 bp, Probe sequence
cgactggggtgtttggactggtggt

SEQ ID NO: 269903 - DNA, 25 bp, Probe sequence
cccaccaatacgctactgctataga

SEQ ID NO: 269904 - DNA, 25 bp, Probe sequence
gcattggcgcttacgacaacaatcc

SEQ ID NO: 269905 - DNA, 25 bp, Probe sequence
gtacctggttctggaatgggagcac

SEQ ID NO: 269906 - DNA, 25 bp, Probe sequence
gagcacaatgctgggatttacctaa

SEQ ID NO: 269907 - DNA, 25 bp, Probe sequence
gagattcacgcaatggttgtagctg

SEQ ID NO: 269908 - DNA, 25 bp, Probe sequence
gatggccaaatatgagatacctcta

SEQ ID NO: 269909 - DNA, 25 bp, Probe sequence
gttcggcatctaaacaaccgcagat

SEQ ID NO: 269910 - DNA, 25 bp, Probe sequence
gtagacgacagcatttggcgttcaa

SEQ ID NO: 269911 - DNA, 25 bp, Probe sequence
gtagaatatccccacttttatgttg

SEQ ID NO: 269912 - DNA, 25 bp, Probe sequence
gtacactatttctagccaagaggtt

SEQ ID NO: 269913 - DNA, 25 bp, Probe sequence
gtaagagactcgtcaccaacagcca

SEQ ID NO: 269914 - DNA, 25 bp, Probe sequence
gggctaacgctacacgagcacaaac

SEQ ID NO: 269915 - DNA, 25 bp, Probe sequence
ggggaaatgctgatgctatggctca

SEQ ID NO: 269916 - DNA, 25 bp, Probe sequence
ggactggtggttgggcaggacatgt

SEQ ID NO: 269917 - DNA, 25 bp, Probe sequence
ggtaaagcgttcgcagaagcttgta

SEQ ID NO: 269918 - DNA, 25 bp, Probe sequence
ggaatcctaagaatccagctaccca

SEQ ID NO: 269919 - DNA, 25 bp, Probe sequence
tgttagaccaccatatcatccagac

SEQ ID NO: 269920 - DNA, 25 bp, Probe sequence
tgattgacaacggtgttcctcctaa

SEQ ID NO: 269921 - DNA, 25 bp, Probe sequence
tttgtaccacaaccaggcgactggg

SEQ ID NO: 269922 - DNA, 25 bp, Probe sequence
tagctattgatgtacctggttctgg

SEQ ID NO: 269923 - DNA, 25 bp, Probe sequence
tatacaactacttcggcattggcgc

SEQ ID NO: 269924 - DNA, 25 bp, Probe sequence
attcttcaacggctttaatgtgcac

SEQ ID NO: 269925 - DNA, 25 bp, Probe sequence
atcgcattaggtttattattcgccg

SEQ ID NO: 269926 - DNA, 25 bp, Probe sequence
agcttcaatgttcttctgcgtcatt

SEQ ID NO: 269927 - DNA, 25 bp, Probe sequence
agctttttagcttcaatgttcttct

SEQ ID NO: 269928 - DNA, 25 bp, Probe sequence
aacggctttaatgtgcacactatat

SEQ ID NO: 269929 - DNA, 25 bp, Probe sequence
aatgtgcacactatatactctagtt

SEQ ID NO: 269930 - DNA, 25 bp, Probe sequence
caatgttcttctgcgtcatttttga

SEQ ID NO: 269931 - DNA, 25 bp, Probe sequence
caccttattcttcaacggctttaat

SEQ ID NO: 269932 - DNA, 25 bp, Probe sequence
cttcaacggctttaatgtgcacact

SEQ ID NO: 269933 - DNA, 25 bp, Probe sequence
cttcaatgttcttctgcgtcatttt

SEQ ID NO: 269934 - DNA, 25 bp, Probe sequence
ctttatctttagctttttagcttca

SEQ ID NO: 269935 - DNA, 25 bp, Probe sequence
ccttattcttcaacggctttaatgt

SEQ ID NO: 269936 - DNA, 25 bp, Probe sequence
gcgtcatttttgatgcacctagaaa

SEQ ID NO: 269937 - DNA, 25 bp, Probe sequence
gcattaggtttattattcgccgacc

SEQ ID NO: 269938 - DNA, 25 bp, Probe sequence
gctttttagcttcaatgttcttctg

SEQ ID NO: 269939 - DNA, 25 bp, Probe sequence
gctttaatgtgcacactatatactc

SEQ ID NO: 269940 - DNA, 25 bp, Probe sequence
gatggatggtttacaccttattctt

SEQ ID NO: 269941 - DNA, 25 bp, Probe sequence
gatggtttacaccttattcttcaac

SEQ ID NO: 269942 - DNA, 25 bp, Probe sequence
gtttacaccttattcttcaacggct

SEQ ID NO: 269943 - DNA, 25 bp, Probe sequence
gtggatggatggtttacaccttatt

SEQ ID NO: 269944 - DNA, 25 bp, Probe sequence
tggctcgtaaacaaaaagaacctgc

SEQ ID NO: 269945 - DNA, 25 bp, Probe sequence
tggatggtttacaccttattcttca

SEQ ID NO: 269946 - DNA, 25 bp, Probe sequence
tggtttacaccttattcttcaacgg

SEQ ID NO: 269947 - DNA, 25 bp, Probe sequence
tgttcttctgcgtcatttttgatgc

SEQ ID NO: 269948 - DNA, 25 bp, Probe sequence
tgcacactatatactctagtttctt

SEQ ID NO: 269949 - DNA, 25 bp, Probe sequence
tctgcgtcatttttgatgcacctag

SEQ ID NO: 269950 - DNA, 25 bp, Probe sequence
tcttctgcgtcatttttgatgcacc

SEQ ID NO: 269951 - DNA, 25 bp, Probe sequence
tcaacggctttaatgtgcacactat

SEQ ID NO: 269952 - DNA, 25 bp, Probe sequence
taggtttattattcgccgaccaaat

SEQ ID NO: 269953 - DNA, 25 bp, Probe sequence
tttacaccttattcttcaacggctt

SEQ ID NO: 269954 - DNA, 25 bp, Probe sequence
tttttgatgcacctagaaaattata

SEQ ID NO: 269955 - DNA, 25 bp, Probe sequence
ttttagcttcaatgttcttctgcgt

SEQ ID NO: 269956 - DNA, 25 bp, Probe sequence
ttagcttcaatgttcttctgcgtca

SEQ ID NO: 269957 - DNA, 25 bp, Probe sequence
ttcgtgaaatcttttaaacgattat

SEQ ID NO: 269958 - DNA, 25 bp, Probe sequence
atacgctttaatcactggagaaaaa

SEQ ID NO: 269959 - DNA, 25 bp, Probe sequence
atgaagatgatttatccaactttta

SEQ ID NO: 269960 - DNA, 25 bp, Probe sequence
atgatttatccaacttttaaagaca

SEQ ID NO: 269961 - DNA, 25 bp, Probe sequence
agatgatttatccaacttttaaaga

SEQ ID NO: 269962 - DNA, 25 bp, Probe sequence
agcaaattaagtggtacgtagacaa

SEQ ID NO: 269963 - DNA, 25 bp, Probe sequence
agaagaatacgctttaatcactgga

SEQ ID NO: 269964 - DNA, 25 bp, Probe sequence
agaatacgctttaatcactggagaa

SEQ ID NO: 269965 - DNA, 25 bp, Probe sequence
acgctttaatcactggagaaaaata

SEQ ID NO: 269966 - DNA, 25 bp, Probe sequence
acaaaagatgaaaagtcacaggtgt

SEQ ID NO: 269967 - DNA, 25 bp, Probe sequence
aacgagcaaattaagtggtacgtag

SEQ ID NO: 269968 - DNA, 25 bp, Probe sequence
aagaagaatacgctttaatcactgg

SEQ ID NO: 269969 - DNA, 25 bp, Probe sequence
aagaatacgctttaatcactggaga

SEQ ID NO: 269970 - DNA, 25 bp, Probe sequence
aagatgatttatccaacttttaaag

SEQ ID NO: 269971 - DNA, 25 bp, Probe sequence
aatacgctttaatcactggagaaaa

SEQ ID NO: 269972 - DNA, 25 bp, Probe sequence
caaattaagtggtacgtagacaagg

SEQ ID NO: 269973 - DNA, 25 bp, Probe sequence
cgctttaatcactggagaaaaatat

SEQ ID NO: 269974 - DNA, 25 bp, Probe sequence
cgagcaaattaagtggtacgtagac

SEQ ID NO: 269975 - DNA, 25 bp, Probe sequence
gctttaatcactggagaaaaatatc

SEQ ID NO: 269976 - DNA, 25 bp, Probe sequence
gcaaattaagtggtacgtagacaag

SEQ ID NO: 269977 - DNA, 25 bp, Probe sequence
gaatacgctttaatcactggagaaa

SEQ ID NO: 269978 - DNA, 25 bp, Probe sequence
gaagatgatttatccaacttttaaa

SEQ ID NO: 269979 - DNA, 25 bp, Probe sequence
gaagaatacgctttaatcactggag

SEQ ID NO: 269980 - DNA, 25 bp, Probe sequence
gacaagggtttaatcgataaagaag

SEQ ID NO: 269981 - DNA, 25 bp, Probe sequence
gagcaaattaagtggtacgtagaca

SEQ ID NO: 269982 - DNA, 25 bp, Probe sequence
gatgatttatccaacttttaaagac

SEQ ID NO: 269983 - DNA, 25 bp, Probe sequence
gtacgtagacaagggtttaatcgat

SEQ ID NO: 269984 - DNA, 25 bp, Probe sequence
gatttatccaacttttaaagacatt

SEQ ID NO: 269985 - DNA, 25 bp, Probe sequence
gtagacaagggtttaatcgataaag

SEQ ID NO: 269986 - DNA, 25 bp, Probe sequence
tggtacgtagacaagggtttaatcg

SEQ ID NO: 269987 - DNA, 25 bp, Probe sequence
tgatttatccaacttttaaagacat

SEQ ID NO: 269988 - DNA, 25 bp, Probe sequence
tgaagatgatttatccaacttttaa

SEQ ID NO: 269989 - DNA, 25 bp, Probe sequence
tacgtagacaagggtttaatcgata

SEQ ID NO: 269990 - DNA, 25 bp, Probe sequence
tacgctttaatcactggagaaaaat

SEQ ID NO: 269991 - DNA, 25 bp, Probe sequence
tagacaagggtttaatcgataaaga

SEQ ID NO: 269992 - DNA, 25 bp, Probe sequence
atgaggaacttcgcggaatggttgc

SEQ ID NO: 269993 - DNA, 25 bp, Probe sequence
accgaatgcatcaaaccaacaaagt

SEQ ID NO: 269994 - DNA, 25 bp, Probe sequence
acgcaatagtttagatgtagatgat

SEQ ID NO: 269995 - DNA, 25 bp, Probe sequence
acgtaccgaatgcatcaaaccaaca

SEQ ID NO: 269996 - DNA, 25 bp, Probe sequence
acaatggaattagctcaacaaaacg

SEQ ID NO: 269997 - DNA, 25 bp, Probe sequence
acaatgtgcctattaaatttaaaga

SEQ ID NO: 269998 - DNA, 25 bp, Probe sequence
aaaccaacaaagtgcgtcagattta

SEQ ID NO: 269999 - DNA, 25 bp, Probe sequence
aaaacgctatgttaacacaacagtt

SEQ ID NO: 270000 - DNA, 25 bp, Probe sequence
aaaagaagacgtaccgaatgcatca

SEQ ID NO: 270001 - DNA, 25 bp, Probe sequence
aacttcgcggaatggttgcgagtat

SEQ ID NO: 270002 - DNA, 25 bp, Probe sequence
aagacgtaccgaatgcatcaaacca

SEQ ID NO: 270003 - DNA, 25 bp, Probe sequence
aatacaatagcaatttcgaaaaaga

SEQ ID NO: 270004 - DNA, 25 bp, Probe sequence
caacaaagtgcgtcagatttaagtg

SEQ ID NO: 270005 - DNA, 25 bp, Probe sequence
catcaaaccaacaaagtgcgtcaga

SEQ ID NO: 270006 - DNA, 25 bp, Probe sequence
gctcaacaaaacgctatgttaacac

SEQ ID NO: 270007 - DNA, 25 bp, Probe sequence
gctatgttaacacaacagttgactg

SEQ ID NO: 270008 - DNA, 25 bp, Probe sequence
gaattagctcaacaaaacgctatgt

SEQ ID NO: 270009 - DNA, 25 bp, Probe sequence
gaatggttgcgagtatgcaaatgca

SEQ ID NO: 270010 - DNA, 25 bp, Probe sequence
gaagacgtaccgaatgcatcaaacc

SEQ ID NO: 270011 - DNA, 25 bp, Probe sequence
gaagagttcgaacctagaaagtttg

SEQ ID NO: 270012 - DNA, 25 bp, Probe sequence
gaaaactaacaaaacaagtactgag

SEQ ID NO: 270013 - DNA, 25 bp, Probe sequence
gactgaactgaaaactaacaaaaca

SEQ ID NO: 270014 - DNA, 25 bp, Probe sequence
gacgtaccgaatgcatcaaaccaac

SEQ ID NO: 270015 - DNA, 25 bp, Probe sequence
gataacaatgtgcctattaaattta

SEQ ID NO: 270016 - DNA, 25 bp, Probe sequence
gttgcgagtatgcaaatgcaggtgg

SEQ ID NO: 270017 - DNA, 25 bp, Probe sequence
gttaacacaacagttgactgaactg

SEQ ID NO: 270018 - DNA, 25 bp, Probe sequence
gtattaacaatggaattagctcaac

SEQ ID NO: 270019 - DNA, 25 bp, Probe sequence
gtagatgataacaatgtgcctatta

SEQ ID NO: 270020 - DNA, 25 bp, Probe sequence
gtaccgaatgcatcaaaccaacaaa

SEQ ID NO: 270021 - DNA, 25 bp, Probe sequence
gtgcgtcagatttaagtgatgagga

SEQ ID NO: 270022 - DNA, 25 bp, Probe sequence
gtgatgaggaacttcgcggaatggt

SEQ ID NO: 270023 - DNA, 25 bp, Probe sequence
ggaacttcgcggaatggttgcgagt

SEQ ID NO: 270024 - DNA, 25 bp, Probe sequence
ttcgcggaatggttgcgagtatgca

SEQ ID NO: 270025 - DNA, 25 bp, Probe sequence
ttcactaacggcgaaattaaataca

SEQ ID NO: 270026 - DNA, 25 bp, Probe sequence
attcgagaagctaaagagtcacgtc

SEQ ID NO: 270027 - DNA, 25 bp, Probe sequence
agtcacgtcaaagagttatggagtc

SEQ ID NO: 270028 - DNA, 25 bp, Probe sequence
agttatggagtctaaaattaccgat

SEQ ID NO: 270029 - DNA, 25 bp, Probe sequence
agagtcacgtcaaagagttatggag

SEQ ID NO: 270030 - DNA, 25 bp, Probe sequence
agagttatggagtctaaaattaccg

SEQ ID NO: 270031 - DNA, 25 bp, Probe sequence
agacagtcaaggatttaaagatatg

SEQ ID NO: 270032 - DNA, 25 bp, Probe sequence
agaagctaaagagtcacgtcaaaga

SEQ ID NO: 270033 - DNA, 25 bp, Probe sequence
agctaaagagtcacgtcaaagagtt

SEQ ID NO: 270034 - DNA, 25 bp, Probe sequence
acgtcaaagagttatggagtctaaa

SEQ ID NO: 270035 - DNA, 25 bp, Probe sequence
aaagagtcacgtcaaagagttatgg

SEQ ID NO: 270036 - DNA, 25 bp, Probe sequence
aagctaaagagtcacgtcaaagagt

SEQ ID NO: 270037 - DNA, 25 bp, Probe sequence
aagagtcacgtcaaagagttatgga

SEQ ID NO: 270038 - DNA, 25 bp, Probe sequence
aattaccgatagaactaaaatgtga

SEQ ID NO: 270039 - DNA, 25 bp, Probe sequence
cacgtcaaagagttatggagtctaa

SEQ ID NO: 270040 - DNA, 25 bp, Probe sequence
ctaaagagtcacgtcaaagagttat

SEQ ID NO: 270041 - DNA, 25 bp, Probe sequence
cgagaagctaaagagtcacgtcaaa

SEQ ID NO: 270042 - DNA, 25 bp, Probe sequence
gctaaagagtcacgtcaaagagtta

SEQ ID NO: 270043 - DNA, 25 bp, Probe sequence
gaagctaaagagtcacgtcaaagag

SEQ ID NO: 270044 - DNA, 25 bp, Probe sequence
gagaagctaaagagtcacgtcaaag

SEQ ID NO: 270045 - DNA, 25 bp, Probe sequence
gagtctaaaattaccgatagaacta

SEQ ID NO: 270046 - DNA, 25 bp, Probe sequence
gagttatggagtctaaaattaccga

SEQ ID NO: 270047 - DNA, 25 bp, Probe sequence
gagtcacgtcaaagagttatggagt

SEQ ID NO: 270048 - DNA, 25 bp, Probe sequence
gatttaaagatatgattcgagaagc

SEQ ID NO: 270049 - DNA, 25 bp, Probe sequence
gattcgagaagctaaagagtcacgt

SEQ ID NO: 270050 - DNA, 25 bp, Probe sequence
gttatggagtctaaaattaccgata

SEQ ID NO: 270051 - DNA, 25 bp, Probe sequence
gtcacgtcaaagagttatggagtct

SEQ ID NO: 270052 - DNA, 25 bp, Probe sequence
ggagtctaaaattaccgatagaact

SEQ ID NO: 270053 - DNA, 25 bp, Probe sequence
tcgagaagctaaagagtcacgtcaa

SEQ ID NO: 270054 - DNA, 25 bp, Probe sequence
tcacgtcaaagagttatggagtcta

SEQ ID NO: 270055 - DNA, 25 bp, Probe sequence
taaagagtcacgtcaaagagttatg

SEQ ID NO: 270056 - DNA, 25 bp, Probe sequence
tatggagtctaaaattaccgataga

SEQ ID NO: 270057 - DNA, 25 bp, Probe sequence
tatagacagtcaaggatttaaagat

SEQ ID NO: 270058 - DNA, 25 bp, Probe sequence
ttatggagtctaaaattaccgatag

SEQ ID NO: 270059 - DNA, 25 bp, Probe sequence
ttcgagaagctaaagagtcacgtca

SEQ ID NO: 270060 - DNA, 25 bp, Probe sequence
attgcaggttggatattagaagtaa

SEQ ID NO: 270061 - DNA, 25 bp, Probe sequence
attttaatttctctcttgaatacca

SEQ ID NO: 270062 - DNA, 25 bp, Probe sequence
ataggcggtgtgaataacaacttta

SEQ ID NO: 270063 - DNA, 25 bp, Probe sequence
atacctatggaatacacttcagata

SEQ ID NO: 270064 - DNA, 25 bp, Probe sequence
atcactactgaagaatcaaaccgat

SEQ ID NO: 270065 - DNA, 25 bp, Probe sequence
acatatccctaagagtattacaaaa

SEQ ID NO: 270066 - DNA, 25 bp, Probe sequence
aagacgtaataacttcccgtctgca

SEQ ID NO: 270067 - DNA, 25 bp, Probe sequence
aagactttaaaggtattgcaggttg

SEQ ID NO: 270068 - DNA, 25 bp, Probe sequence
aagagtattacaaaattatcagatt

SEQ ID NO: 270069 - DNA, 25 bp, Probe sequence
aaggtattgcaggttggatattaga

SEQ ID NO: 270070 - DNA, 25 bp, Probe sequence
aatcgttggtttagatttctatatc

SEQ ID NO: 270071 - DNA, 25 bp, Probe sequence
ctggtggcgttggtaaatggagttt

SEQ ID NO: 270072 - DNA, 25 bp, Probe sequence
cggtcacggtacacacaatgcgtat

SEQ ID NO: 270073 - DNA, 25 bp, Probe sequence
ccgtctgcacatcaatttttagtta

SEQ ID NO: 270074 - DNA, 25 bp, Probe sequence
gcggtcacggtacacacaatgcgta

SEQ ID NO: 270075 - DNA, 25 bp, Probe sequence
gcacatcaatttttagttagaaact

SEQ ID NO: 270076 - DNA, 25 bp, Probe sequence
gaagtaaaatcgaatacaccaggta

SEQ ID NO: 270077 - DNA, 25 bp, Probe sequence
gacgtaataacttcccgtctgcaca

SEQ ID NO: 270078 - DNA, 25 bp, Probe sequence
gacaaagtattgtatcaaatggata

SEQ ID NO: 270079 - DNA, 25 bp, Probe sequence
gactttaaaggtattgcaggttgga

SEQ ID NO: 270080 - DNA, 25 bp, Probe sequence
gatttctatatcactactgaagaat

SEQ ID NO: 270081 - DNA, 25 bp, Probe sequence
gatttactgattttcctaaagactt

SEQ ID NO: 270082 - DNA, 25 bp, Probe sequence
gattttaatttctctcttgaatacc

SEQ ID NO: 270083 - DNA, 25 bp, Probe sequence
gtctgcacatcaatttttagttaga

SEQ ID NO: 270084 - DNA, 25 bp, Probe sequence
ggtactggtggcgttggtaaatgga

SEQ ID NO: 270085 - DNA, 25 bp, Probe sequence
ggatatacctatggaatacacttca

SEQ ID NO: 270086 - DNA, 25 bp, Probe sequence
ggcgttggtaaatggagtttattcg

SEQ ID NO: 270087 - DNA, 25 bp, Probe sequence
tggagtttattcgaaggaaaggtgg

SEQ ID NO: 270088 - DNA, 25 bp, Probe sequence
tcccgtctgcacatcaatttttagt

SEQ ID NO: 270089 - DNA, 25 bp, Probe sequence
tcgatataggcggtgtgaataacaa

SEQ ID NO: 270090 - DNA, 25 bp, Probe sequence
tcaaaccgatttactgattttccta

SEQ ID NO: 270091 - DNA, 25 bp, Probe sequence
tttggtactggtggcgttggtaaat

SEQ ID NO: 270092 - DNA, 25 bp, Probe sequence
tatcaaatggatatacctatggaat

SEQ ID NO: 270093 - DNA, 25 bp, Probe sequence
ttcccgtctgcacatcaatttttag

SEQ ID NO: 270094 - DNA, 25 bp, Probe sequence
attgcaggctgggtgttagaagtaa

SEQ ID NO: 270095 - DNA, 25 bp, Probe sequence
atacaccgggtaacacaacacaagt

SEQ ID NO: 270096 - DNA, 25 bp, Probe sequence
atggcttacggattaataacaagtt

SEQ ID NO: 270097 - DNA, 25 bp, Probe sequence
agtgtttagagatgcaggttggttc

SEQ ID NO: 270098 - DNA, 25 bp, Probe sequence
acgacgtatcgatattggcggtgtg

SEQ ID NO: 270099 - DNA, 25 bp, Probe sequence
acatatccctaagagcatcacgaaa

SEQ ID NO: 270100 - DNA, 25 bp, Probe sequence
acaagtttgcattctatcactggcg

SEQ ID NO: 270101 - DNA, 25 bp, Probe sequence
aaatggccgttttagcaacatgata

SEQ ID NO: 270102 - DNA, 25 bp, Probe sequence
aaaacttctgaacaacaagctaaga

SEQ ID NO: 270103 - DNA, 25 bp, Probe sequence
aaaacattgcacctcaagtatcgat

SEQ ID NO: 270104 - DNA, 25 bp, Probe sequence
caacgaggtaaaagacgcgcgtgtt

SEQ ID NO: 270105 - DNA, 25 bp, Probe sequence
caggttggttctttgatgtactgcc

SEQ ID NO: 270106 - DNA, 25 bp, Probe sequence
ctggtggtaatagtggttggagcat

SEQ ID NO: 270107 - DNA, 25 bp, Probe sequence
gctcagcacgagtacaactatcgat

SEQ ID NO: 270108 - DNA, 25 bp, Probe sequence
gcacttttaatcggggtaactattg

SEQ ID NO: 270109 - DNA, 25 bp, Probe sequence
gcacctcaagtatcgatgactgatt

SEQ ID NO: 270110 - DNA, 25 bp, Probe sequence
gcaagaaccggaattcatcacagat

SEQ ID NO: 270111 - DNA, 25 bp, Probe sequence
gaattcatcacagatttatcgccat

SEQ ID NO: 270112 - DNA, 25 bp, Probe sequence
gaagaatcaaaacgtttttctgact

SEQ ID NO: 270113 - DNA, 25 bp, Probe sequence
gaaatatacgcacactcagcaaaac

SEQ ID NO: 270114 - DNA, 25 bp, Probe sequence
gacgcgcgtgttgataatactggtt

SEQ ID NO: 270115 - DNA, 25 bp, Probe sequence
gagcatcacgaaattgtctgattta

SEQ ID NO: 270116 - DNA, 25 bp, Probe sequence
gatatccctatgcaatacacttcag

SEQ ID NO: 270117 - DNA, 25 bp, Probe sequence
gtttagacttctatatcaccactga

SEQ ID NO: 270118 - DNA, 25 bp, Probe sequence
gtttgcattctatcactggcgaaaa

SEQ ID NO: 270119 - DNA, 25 bp, Probe sequence
gtactgtaccaaatggatatcccta

SEQ ID NO: 270120 - DNA, 25 bp, Probe sequence
gtaataactttgcttctgctcacca

SEQ ID NO: 270121 - DNA, 25 bp, Probe sequence
ggcgaaaaagtagttgctcagcacg

SEQ ID NO: 270122 - DNA, 25 bp, Probe sequence
tctgctcaccagtttttcgttagaa

SEQ ID NO: 270123 - DNA, 25 bp, Probe sequence
tacaaaggtattgcaggctgggtgt

SEQ ID NO: 270124 - DNA, 25 bp, Probe sequence
taaaaacggcggacacggcacacac

SEQ ID NO: 270125 - DNA, 25 bp, Probe sequence
tattctatcggtcaaagaggtgtta

SEQ ID NO: 270126 - DNA, 25 bp, Probe sequence
tttatcgccatatactaacgcagta

SEQ ID NO: 270127 - DNA, 25 bp, Probe sequence
ttttctgacttccctaaagattaca

SEQ ID NO: 270128 - DNA, 25 bp, Probe sequence
ataagtttgtattgacgccttttgc

SEQ ID NO: 270129 - DNA, 25 bp, Probe sequence
atgctgacggtgtattaacttttga

SEQ ID NO: 270130 - DNA, 25 bp, Probe sequence
atggcgcacctgtaccagtagaaac

SEQ ID NO: 270131 - DNA, 25 bp, Probe sequence
agatgcaagtgatttcgccaccttc

SEQ ID NO: 270132 - DNA, 25 bp, Probe sequence
agaaacattcgaacacgctgggctc

SEQ ID NO: 270133 - DNA, 25 bp, Probe sequence
accacctaaaggtaatggcgcacct

SEQ ID NO: 270134 - DNA, 25 bp, Probe sequence
acgccaacgctataaaactcgagga

SEQ ID NO: 270135 - DNA, 25 bp, Probe sequence
acatctgacggcactatcgttcatg

SEQ ID NO: 270136 - DNA, 25 bp, Probe sequence
aaatacttgtaatgacagctactag

SEQ ID NO: 270137 - DNA, 25 bp, Probe sequence
aactgtgactacatctgacggcact

SEQ ID NO: 270138 - DNA, 25 bp, Probe sequence
caatctttgtctttggactttttgg

SEQ ID NO: 270139 - DNA, 25 bp, Probe sequence
caactggttgaatgtactgctagag

SEQ ID NO: 270140 - DNA, 25 bp, Probe sequence
cacgctgggctcgtaatggaagcta

SEQ ID NO: 270141 - DNA, 25 bp, Probe sequence
cagaaggcgacagacaactggttga

SEQ ID NO: 270142 - DNA, 25 bp, Probe sequence
gctcagatattggcttgtagtgaat

SEQ ID NO: 270143 - DNA, 25 bp, Probe sequence
gaatgatttagtccgtatagtacaa

SEQ ID NO: 270144 - DNA, 25 bp, Probe sequence
gaaggtaagctctaaaactgtgact

SEQ ID NO: 270145 - DNA, 25 bp, Probe sequence
gacatccacgcagaaccatttaaag

SEQ ID NO: 270146 - DNA, 25 bp, Probe sequence
gacggcactatcgttcatgatttta

SEQ ID NO: 270147 - DNA, 25 bp, Probe sequence
gacccacaacccggagacatagtac

SEQ ID NO: 270148 - DNA, 25 bp, Probe sequence
gatttcgccaccttcattagaggat

SEQ ID NO: 270149 - DNA, 25 bp, Probe sequence
gtattgacgccttttgcaaatcaaa

SEQ ID NO: 270150 - DNA, 25 bp, Probe sequence
gtaacgcttggtgagtttaatcgag

SEQ ID NO: 270151 - DNA, 25 bp, Probe sequence
gtcttattttatttctgacgaagtc

SEQ ID NO: 270152 - DNA, 25 bp, Probe sequence
gtgcattagctgaaatatacggcga

SEQ ID NO: 270153 - DNA, 25 bp, Probe sequence
ggtactggaatgctttttgaagtcg

SEQ ID NO: 270154 - DNA, 25 bp, Probe sequence
tgacgaagtcaacgccaacgctata

SEQ ID NO: 270155 - DNA, 25 bp, Probe sequence
ggcgattctgtagctagaggatcac

SEQ ID NO: 270156 - DNA, 25 bp, Probe sequence
tggattgttagtcatgtcgaaggtg

SEQ ID NO: 270157 - DNA, 25 bp, Probe sequence
tcatatccagaagcagacccacaac

SEQ ID NO: 270158 - DNA, 25 bp, Probe sequence
tcaatagctaaatcaacactcgatt

SEQ ID NO: 270159 - DNA, 25 bp, Probe sequence
taatactgcagctaactatgtttct

SEQ ID NO: 270160 - DNA, 25 bp, Probe sequence
taacattgtgtttcaaggtactgga

SEQ ID NO: 270161 - DNA, 25 bp, Probe sequence
tatacggcgacatccacgcagaacc

SEQ ID NO: 270162 - DNA, 25 bp, Probe sequence
atacggagctaataaatttgagttt

SEQ ID NO: 270163 - DNA, 25 bp, Probe sequence
atgcaaatcaacacaaagtatcaag

SEQ ID NO: 270164 - DNA, 25 bp, Probe sequence
aggcgaagatacagaatcgtttgta

SEQ ID NO: 270165 - DNA, 25 bp, Probe sequence
aggttggattgtggtcgtttgattt

SEQ ID NO: 270166 - DNA, 25 bp, Probe sequence
agatatagttgttccttgtttttgt

SEQ ID NO: 270167 - DNA, 25 bp, Probe sequence
aaaaatcgttcagacattgcttata

SEQ ID NO: 270168 - DNA, 25 bp, Probe sequence
aagatggtactgtaatcaaattaag

SEQ ID NO: 270169 - DNA, 25 bp, Probe sequence
aattgtttatgatagcttccgagtt

SEQ ID NO: 270170 - DNA, 25 bp, Probe sequence
catagaacctatgtatttgcgagaa

SEQ ID NO: 270171 - DNA, 25 bp, Probe sequence
ctatcatggtagtgctcctaacgac

SEQ ID NO: 270172 - DNA, 25 bp, Probe sequence
gctcctaacgaccaattcaacatgt

SEQ ID NO: 270173 - DNA, 25 bp, Probe sequence
gcgagatatgttgtattcgttaacg

SEQ ID NO: 270174 - DNA, 25 bp, Probe sequence
gcaaaggtacagtttactatcatgg

SEQ ID NO: 270175 - DNA, 25 bp, Probe sequence
gaatattcaagacacgatcaacaaa

SEQ ID NO: 270176 - DNA, 25 bp, Probe sequence
gaacggtcgtatattaatggggagc

SEQ ID NO: 270177 - DNA, 25 bp, Probe sequence
gaaacgaatatagcccaaccaaaat

SEQ ID NO: 270178 - DNA, 25 bp, Probe sequence
gaaactacagaattaccatacggtg

SEQ ID NO: 270179 - DNA, 25 bp, Probe sequence
gataacaattattttaggcgaagat

SEQ ID NO: 270180 - DNA, 25 bp, Probe sequence
gatagcttccgagtttataaaaacg

SEQ ID NO: 270181 - DNA, 25 bp, Probe sequence
gttcagacattgcttatatgcgaga

SEQ ID NO: 270182 - DNA, 25 bp, Probe sequence
gtttatgatagcttccgagtttata

SEQ ID NO: 270183 - DNA, 25 bp, Probe sequence
gtattggaacaagcctagagttaga

SEQ ID NO: 270184 - DNA, 25 bp, Probe sequence
gtatggaatttaacgcatgctgaaa

SEQ ID NO: 270185 - DNA, 25 bp, Probe sequence
gtagagatatagttgttccttgttt

SEQ ID NO: 270186 - DNA, 25 bp, Probe sequence
gtggtcgtttgattttaatattgat

SEQ ID NO: 270187 - DNA, 25 bp, Probe sequence
ggggagcaattatatcagtagagat

SEQ ID NO: 270188 - DNA, 25 bp, Probe sequence
ggcatgcaggcggagacaaaagaaa

SEQ ID NO: 270189 - DNA, 25 bp, Probe sequence
tgaatacgggtttatcgttaacgat

SEQ ID NO: 270190 - DNA, 25 bp, Probe sequence
taccgaaacgaatatagcccaacca

SEQ ID NO: 270191 - DNA, 25 bp, Probe sequence
taacgaccaattcaacatgtataaa

SEQ ID NO: 270192 - DNA, 25 bp, Probe sequence
tagtgctcctaacgaccaattcaac

SEQ ID NO: 270193 - DNA, 25 bp, Probe sequence
tattgattggcatgcaggcggagac

SEQ ID NO: 270194 - DNA, 25 bp, Probe sequence
ttcgttaacgacagacatagaacct

SEQ ID NO: 270195 - DNA, 25 bp, Probe sequence
ttgaattacaggtttactcaaccaa

SEQ ID NO: 270196 - DNA, 25 bp, Probe sequence
atgctaacccaagaattcgaacgtt

SEQ ID NO: 270197 - DNA, 25 bp, Probe sequence
attacagatttgaacgttattgagc

SEQ ID NO: 270198 - DNA, 25 bp, Probe sequence
ataagatttagtagcgaacgtgatg

SEQ ID NO: 270199 - DNA, 25 bp, Probe sequence
atgaattctttaaagttatagcaga

SEQ ID NO: 270200 - DNA, 25 bp, Probe sequence
atgtcaacacttggtattacagatt

SEQ ID NO: 270201 - DNA, 25 bp, Probe sequence
agaatataactatcgaatgtatgcg

SEQ ID NO: 270202 - DNA, 25 bp, Probe sequence
acttggtattacagatttgaacgtt

SEQ ID NO: 270203 - DNA, 25 bp, Probe sequence
acttgcgtttgctattcgtgatgct

SEQ ID NO: 270204 - DNA, 25 bp, Probe sequence
aaacttgcgtttgctattcgtgatg

SEQ ID NO: 270205 - DNA, 25 bp, Probe sequence
aaacgacgtattgccttatgaagaa

SEQ ID NO: 270206 - DNA, 25 bp, Probe sequence
aactatcgaatgtatgcgaaagagt

SEQ ID NO: 270207 - DNA, 25 bp, Probe sequence
gaattcgaacgttacaaacttgcgt

SEQ ID NO: 270208 - DNA, 25 bp, Probe sequence
cgacgtattgccttatgaagaaaat

SEQ ID NO: 270209 - DNA, 25 bp, Probe sequence
gcgaacgtgatgaatacgaaccaca

SEQ ID NO: 270210 - DNA, 25 bp, Probe sequence
gcgtttgctattcgtgatgctgcag

SEQ ID NO: 270211 - DNA, 25 bp, Probe sequence
gctattcgtgatgctgcagctacta

SEQ ID NO: 270212 - DNA, 25 bp, Probe sequence
gcagctactaaaaatgttgggacag

SEQ ID NO: 270213 - DNA, 25 bp, Probe sequence
gaagaaaatatccaacggcttaacg

SEQ ID NO: 270214 - DNA, 25 bp, Probe sequence
gaaccacaaaataatgaattcttta

SEQ ID NO: 270215 - DNA, 25 bp, Probe sequence
gaacgttattgagcaaatgacatta

SEQ ID NO: 270216 - DNA, 25 bp, Probe sequence
gaacgttacaaacttgcgtttgcta

SEQ ID NO: 270217 - DNA, 25 bp, Probe sequence
gaaaatatccaacggcttaacgaag

SEQ ID NO: 270218 - DNA, 25 bp, Probe sequence
gaaagagtatgaaatgctaacccaa

SEQ ID NO: 270219 - DNA, 25 bp, Probe sequence
gaaatgctaacccaagaattcgaac

SEQ ID NO: 270220 - DNA, 25 bp, Probe sequence
gacattaacagaatataactatcga

SEQ ID NO: 270221 - DNA, 25 bp, Probe sequence
gagtatgaaatgctaacccaagaat

SEQ ID NO: 270222 - DNA, 25 bp, Probe sequence
gatgctgcagctactaaaaatgttg

SEQ ID NO: 270223 - DNA, 25 bp, Probe sequence
gtttgctattcgtgatgctgcagct

SEQ ID NO: 270224 - DNA, 25 bp, Probe sequence
gtcaacacttggtattacagatttg

SEQ ID NO: 270225 - DNA, 25 bp, Probe sequence
tgatgaatacgaaccacaaaataat

SEQ ID NO: 270226 - DNA, 25 bp, Probe sequence
tattcgtgatgctgcagctactaaa

SEQ ID NO: 270227 - DNA, 25 bp, Probe sequence
ttcgtgatgctgcagctactaaaaa

SEQ ID NO: 270228 - DNA, 25 bp, Probe sequence
ttgcgtttgctattcgtgatgctgc

SEQ ID NO: 270229 - DNA, 25 bp, Probe sequence
ttgctattcgtgatgctgcagctac

SEQ ID NO: 270230 - DNA, 25 bp, Probe sequence
gacccgaaacctagtcgaagtagtg

SEQ ID NO: 270231 - DNA, 25 bp, Probe sequence
acggagttgggaaagcgacctatga

SEQ ID NO: 270232 - DNA, 25 bp, Probe sequence
atgacccgaaacctagtcgaagtag

SEQ ID NO: 270233 - DNA, 25 bp, Probe sequence
agcttctatcggtcaaggtgtatca

SEQ ID NO: 270234 - DNA, 25 bp, Probe sequence
aacggagttgggaaagcgacctatg

SEQ ID NO: 270235 - DNA, 25 bp, Probe sequence
aagcttctatcggtcaaggtgtatc

SEQ ID NO: 270236 - DNA, 25 bp, Probe sequence
aaggtgtatcaatgttgcctgtagg

SEQ ID NO: 270237 - DNA, 25 bp, Probe sequence
aattactattaataacattgatgaa

SEQ ID NO: 270238 - DNA, 25 bp, Probe sequence
caaggtgtatcaatgttgcctgtag

SEQ ID NO: 270239 - DNA, 25 bp, Probe sequence
caagcttctatcggtcaaggtgtat

SEQ ID NO: 270240 - DNA, 25 bp, Probe sequence
ctatgacccgaaacctagtcgaagt

SEQ ID NO: 270241 - DNA, 25 bp, Probe sequence
ctatcggtcaaggtgtatcaatgtt

SEQ ID NO: 270242 - DNA, 25 bp, Probe sequence
cctatgacccgaaacctagtcgaag

SEQ ID NO: 270243 - DNA, 25 bp, Probe sequence
gcttctatcggtcaaggtgtatcaa

SEQ ID NO: 270244 - DNA, 25 bp, Probe sequence
gaaagtcattagaattaagttttgg

SEQ ID NO: 270245 - DNA, 25 bp, Probe sequence
gacctatgacccgaaacctagtcga

SEQ ID NO: 270246 - DNA, 25 bp, Probe sequence
gagaaatcgataaccgattaggttt

SEQ ID NO: 270247 - DNA, 25 bp, Probe sequence
gagttgggaaagcgacctatgaccc

SEQ ID NO: 270248 - DNA, 25 bp, Probe sequence
gttgggaaagcgacctatgacccga

SEQ ID NO: 270249 - DNA, 25 bp, Probe sequence
gtatcaatgttgcctgtaggtttag

SEQ ID NO: 270250 - DNA, 25 bp, Probe sequence
gtagaaattaacggaaagtcattag

SEQ ID NO: 270251 - DNA, 25 bp, Probe sequence
gtcaaggtgtatcaatgttgcctgt

SEQ ID NO: 270252 - DNA, 25 bp, Probe sequence
gtgtatcaatgttgcctgtaggttt

SEQ ID NO: 270253 - DNA, 25 bp, Probe sequence
ggtgtatcaatgttgcctgtaggtt

SEQ ID NO: 270254 - DNA, 25 bp, Probe sequence
ggtcaaggtgtatcaatgttgcctg

SEQ ID NO: 270255 - DNA, 25 bp, Probe sequence
ggagttgggaaagcgacctatgacc

SEQ ID NO: 270256 - DNA, 25 bp, Probe sequence
tgggaaagcgacctatgacccgaaa

SEQ ID NO: 270257 - DNA, 25 bp, Probe sequence
taacggagttgggaaagcgacctat

SEQ ID NO: 270258 - DNA, 25 bp, Probe sequence
tcggtcaaggtgtatcaatgttgcc

SEQ ID NO: 270259 - DNA, 25 bp, Probe sequence
tagtcgaagtagtggaaacggaaga

SEQ ID NO: 270260 - DNA, 25 bp, Probe sequence
tatgacccgaaacctagtcgaagta

SEQ ID NO: 270261 - DNA, 25 bp, Probe sequence
tatcaatgttgcctgtaggtttaga

SEQ ID NO: 270262 - DNA, 25 bp, Probe sequence
ttgggaaagcgacctatgacccgaa

SEQ ID NO: 270263 - DNA, 25 bp, Probe sequence
ttctatcggtcaaggtgtatcaatg

SEQ ID NO: 270264 - DNA, 25 bp, Probe sequence
atttaacagcaattccacaacctaa

SEQ ID NO: 270265 - DNA, 25 bp, Probe sequence
atgctttttttaactgaatacggct

SEQ ID NO: 270266 - DNA, 25 bp, Probe sequence
agctggcgaaaaagtagatgctact

SEQ ID NO: 270267 - DNA, 25 bp, Probe sequence
acctgaggctgtaacaaagaaactt

SEQ ID NO: 270268 - DNA, 25 bp, Probe sequence
acggcttatcacatgaagctgatac

SEQ ID NO: 270269 - DNA, 25 bp, Probe sequence
aaagcagaagctaacggtattgatg

SEQ ID NO: 270270 - DNA, 25 bp, Probe sequence
aacactacctgaggctgtaacaaag

SEQ ID NO: 270271 - DNA, 25 bp, Probe sequence
aactgaatacggcttatcacatgaa

SEQ ID NO: 270272 - DNA, 25 bp, Probe sequence
aatgttttatggtgacgattttgca

SEQ ID NO: 270273 - DNA, 25 bp, Probe sequence
caaggtttccacaataaatttgaat

SEQ ID NO: 270274 - DNA, 25 bp, Probe sequence
caatgtctggtactgctaaaatgtt

SEQ ID NO: 270275 - DNA, 25 bp, Probe sequence
ccaacgtggatttgcaacactacct

SEQ ID NO: 270276 - DNA, 25 bp, Probe sequence
gcgaaatatttccaaggtttccaca

SEQ ID NO: 270277 - DNA, 25 bp, Probe sequence
gcagaagctaacggtattgatgaat

SEQ ID NO: 270278 - DNA, 25 bp, Probe sequence
gcagttgtagatcgcgtattgtatg

SEQ ID NO: 270279 - DNA, 25 bp, Probe sequence
gaatacggcttatcacatgaagctg

SEQ ID NO: 270280 - DNA, 25 bp, Probe sequence
gaatggtcgtttccaacgtggattt

SEQ ID NO: 270281 - DNA, 25 bp, Probe sequence
gaagatgcagttgtagatcgcgtat

SEQ ID NO: 270282 - DNA, 25 bp, Probe sequence
gaagctgatacagatacagaggata

SEQ ID NO: 270283 - DNA, 25 bp, Probe sequence
gaaacttaaggcgactggatacaga

SEQ ID NO: 270284 - DNA, 25 bp, Probe sequence
gatttgcaacactacctgaggctgt

SEQ ID NO: 270285 - DNA, 25 bp, Probe sequence
gtagatgctactaaaatgctttttt

SEQ ID NO: 270286 - DNA, 25 bp, Probe sequence
gtctggtactgctaaaatgttttat

SEQ ID NO: 270287 - DNA, 25 bp, Probe sequence
gtgacgattttgcagatgaaattga

SEQ ID NO: 270288 - DNA, 25 bp, Probe sequence
gtggatttgcaacactacctgaggc

SEQ ID NO: 270289 - DNA, 25 bp, Probe sequence
ggagtgaatggtcgtttccaacgtg

SEQ ID NO: 270290 - DNA, 25 bp, Probe sequence
ggtcgtttccaacgtggatttgcaa

SEQ ID NO: 270291 - DNA, 25 bp, Probe sequence
ggaagttgaaagtagaataccaggc

SEQ ID NO: 270292 - DNA, 25 bp, Probe sequence
ggcgaagatttaacagcaattccac

SEQ ID NO: 270293 - DNA, 25 bp, Probe sequence
tgcaacactacctgaggctgtaaca

SEQ ID NO: 270294 - DNA, 25 bp, Probe sequence
tcaacaatgtctggtactgctaaaa

SEQ ID NO: 270295 - DNA, 25 bp, Probe sequence
tatttccaaggtttccacaataaat

SEQ ID NO: 270296 - DNA, 25 bp, Probe sequence
ttatggtgacgattttgcagatgaa

SEQ ID NO: 270297 - DNA, 25 bp, Probe sequence
ttaaggcgactggatacagattcca

SEQ ID NO: 270298 - DNA, 25 bp, Probe sequence
atgacaccgaacttacaactttata

SEQ ID NO: 270299 - DNA, 25 bp, Probe sequence
aggacatcatgacggacttgttaaa

SEQ ID NO: 270300 - DNA, 25 bp, Probe sequence
agagatgcaacaagagattccgtat

SEQ ID NO: 270301 - DNA, 25 bp, Probe sequence
agaagtaagtacacgtttgatagtt

SEQ ID NO: 270302 - DNA, 25 bp, Probe sequence
acgaatttagttattgatatttgga

SEQ ID NO: 270303 - DNA, 25 bp, Probe sequence
aacaaacgattatgactttgaagaa

SEQ ID NO: 270304 - DNA, 25 bp, Probe sequence
aacgctacaaggatatggattccct

SEQ ID NO: 270305 - DNA, 25 bp, Probe sequence
aaggatatggattccctgttatttc

SEQ ID NO: 270306 - DNA, 25 bp, Probe sequence
aatgccggagtcaaatagaagtaag

SEQ ID NO: 270307 - DNA, 25 bp, Probe sequence
caagagattccgtatcctttttttg

SEQ ID NO: 270308 - DNA, 25 bp, Probe sequence
cacgtttgatagttattctggcgat

SEQ ID NO: 270309 - DNA, 25 bp, Probe sequence
ctggcgatacgaatttagttattga

SEQ ID NO: 270310 - DNA, 25 bp, Probe sequence
gcgtatgaaacgctacaaggatatg

SEQ ID NO: 270311 - DNA, 25 bp, Probe sequence
gctacaaggatatggattccctgtt

SEQ ID NO: 270312 - DNA, 25 bp, Probe sequence
gcaacaagagattccgtatcctttt

SEQ ID NO: 270313 - DNA, 25 bp, Probe sequence
gacaccgaacttacaactttataat

SEQ ID NO: 270314 - DNA, 25 bp, Probe sequence
gacatcatgacggacttgttaaaag

SEQ ID NO: 270315 - DNA, 25 bp, Probe sequence
gatgcaacaagagattccgtatcct

SEQ ID NO: 270316 - DNA, 25 bp, Probe sequence
gatttaggacatcatgacggacttg

SEQ ID NO: 270317 - DNA, 25 bp, Probe sequence
gatagttattctggcgatacgaatt

SEQ ID NO: 270318 - DNA, 25 bp, Probe sequence
gatatggattccctgttatttctcg

SEQ ID NO: 270319 - DNA, 25 bp, Probe sequence
gatatttggagtgtaagcgatgatt

SEQ ID NO: 270320 - DNA, 25 bp, Probe sequence
gattccctgttatttctcgtaaaga

SEQ ID NO: 270321 - DNA, 25 bp, Probe sequence
gttatttctcgtaaagagatgcaac

SEQ ID NO: 270322 - DNA, 25 bp, Probe sequence
gttattctggcgatacgaatttagt

SEQ ID NO: 270323 - DNA, 25 bp, Probe sequence
gtttgatagttattctggcgatacg

SEQ ID NO: 270324 - DNA, 25 bp, Probe sequence
gtacacgtttgatagttattctggc

SEQ ID NO: 270325 - DNA, 25 bp, Probe sequence
gtaataaaaatgccggagtcaaata

SEQ ID NO: 270326 - DNA, 25 bp, Probe sequence
ggagtgtaagcgatgatttaggaca

SEQ ID NO: 270327 - DNA, 25 bp, Probe sequence
tgatttaacacctagcgttaaaaca

SEQ ID NO: 270328 - DNA, 25 bp, Probe sequence
taacgatatcttacaaaacatttta

SEQ ID NO: 270329 - DNA, 25 bp, Probe sequence
tatggattccctgttatttctcgta

SEQ ID NO: 270330 - DNA, 25 bp, Probe sequence
ttaggacatcatgacggacttgtta

SEQ ID NO: 270331 - DNA, 25 bp, Probe sequence
ttccctgttatttctcgtaaagaga

SEQ ID NO: 270332 - DNA, 25 bp, Probe sequence
attgctgatgataaagcgtttgcta

SEQ ID NO: 270333 - DNA, 25 bp, Probe sequence
attacacttattcacaattctttga

SEQ ID NO: 270334 - DNA, 25 bp, Probe sequence
atgattgctgaagctttctataaaa

SEQ ID NO: 270335 - DNA, 25 bp, Probe sequence
accacaagtatttaaccctgacaat

SEQ ID NO: 270336 - DNA, 25 bp, Probe sequence
aaagtttgacgaggcaggtattttg

SEQ ID NO: 270337 - DNA, 25 bp, Probe sequence
aaaagaacagattcagttccaggag

SEQ ID NO: 270338 - DNA, 25 bp, Probe sequence
aagttagttcctgctgacaaaagaa

SEQ ID NO: 270339 - DNA, 25 bp, Probe sequence
aacacctatcttacaagaggttatg

SEQ ID NO: 270340 - DNA, 25 bp, Probe sequence
aagatggcacgttgttaaacgactt

SEQ ID NO: 270341 - DNA, 25 bp, Probe sequence
aatcactggtgacttcgacaaattg

SEQ ID NO: 270342 - DNA, 25 bp, Probe sequence
caagcaacttaaaacgtggtgaatt

SEQ ID NO: 270343 - DNA, 25 bp, Probe sequence
cacacctgtaaacttgtttgaacaa

SEQ ID NO: 270344 - DNA, 25 bp, Probe sequence
cagtgattcgttagacggtctacct

SEQ ID NO: 270345 - DNA, 25 bp, Probe sequence
cgactttacaacacctatcttacaa

SEQ ID NO: 270346 - DNA, 25 bp, Probe sequence
gcgtttgctaagttagttcctgctg

SEQ ID NO: 270347 - DNA, 25 bp, Probe sequence
gcatgtagcattgcatattgctgat

SEQ ID NO: 270348 - DNA, 25 bp, Probe sequence
gcaattaggtaagtacgaaccaatg

SEQ ID NO: 270349 - DNA, 25 bp, Probe sequence
gaattcttgaattacacttattcac

SEQ ID NO: 270350 - DNA, 25 bp, Probe sequence
gaagaagtttactttttgggctgat

SEQ ID NO: 270351 - DNA, 25 bp, Probe sequence
gacaaattgatttatggtatccctc

SEQ ID NO: 270352 - DNA, 25 bp, Probe sequence
gaccgtaacagtgattcgttagacg

SEQ ID NO: 270353 - DNA, 25 bp, Probe sequence
gacgaggcaggtattttgaatcaag

SEQ ID NO: 270354 - DNA, 25 bp, Probe sequence
gtaacaatgttaaaccacaagtatt

SEQ ID NO: 270355 - DNA, 25 bp, Probe sequence
gtggtgaattaatcactggtgactt

SEQ ID NO: 270356 - DNA, 25 bp, Probe sequence
gggctgataaaccaggtgcttactg

SEQ ID NO: 270357 - DNA, 25 bp, Probe sequence
ggtgcttactgggtaggtgaaggtc

SEQ ID NO: 270358 - DNA, 25 bp, Probe sequence
tgtagatcctgaaacgaaagaacgt

SEQ ID NO: 270359 - DNA, 25 bp, Probe sequence
tgagagcgtttaaattaggggttat

SEQ ID NO: 270360 - DNA, 25 bp, Probe sequence
tgaaacctatgattgctgaagcttt

SEQ ID NO: 270361 - DNA, 25 bp, Probe sequence
tgctaagttagttcctgctgacaaa

SEQ ID NO: 270362 - DNA, 25 bp, Probe sequence
tacgaaccaatggaaggtactgaga

SEQ ID NO: 270363 - DNA, 25 bp, Probe sequence
taaacgactttacaacacctatctt

SEQ ID NO: 270364 - DNA, 25 bp, Probe sequence
ttcgttagacggtctacctgtggtt

SEQ ID NO: 270365 - DNA, 25 bp, Probe sequence
ttaaccctgacaatgtaatgatgca

SEQ ID NO: 270366 - DNA, 25 bp, Probe sequence
atactgacaaataccttagagacat

SEQ ID NO: 270367 - DNA, 25 bp, Probe sequence
atcgaaatataatgaacctctcttt

SEQ ID NO: 270368 - DNA, 25 bp, Probe sequence
atgagtaatactgacaaatacctta

SEQ ID NO: 270369 - DNA, 25 bp, Probe sequence
aggtcggcagtattagccgataaag

SEQ ID NO: 270370 - DNA, 25 bp, Probe sequence
accttagagacatagcaagagaatt

SEQ ID NO: 270371 - DNA, 25 bp, Probe sequence
acgaaacagttattattgatgcaaa

SEQ ID NO: 270372 - DNA, 25 bp, Probe sequence
actgacaaataccttagagacatag

SEQ ID NO: 270373 - DNA, 25 bp, Probe sequence
aacgaaacagttattattgatgcaa

SEQ ID NO: 270374 - DNA, 25 bp, Probe sequence
aagcgaaacgaaacagttattattg

SEQ ID NO: 270375 - DNA, 25 bp, Probe sequence
aaggtcggcagtattagccgataaa

SEQ ID NO: 270376 - DNA, 25 bp, Probe sequence
aatcgaaatataatgaacctctctt

SEQ ID NO: 270377 - DNA, 25 bp, Probe sequence
aatactgacaaataccttagagaca

SEQ ID NO: 270378 - DNA, 25 bp, Probe sequence
aataccttagagacatagcaagaga

SEQ ID NO: 270379 - DNA, 25 bp, Probe sequence
caaataccttagagacatagcaaga

SEQ ID NO: 270380 - DNA, 25 bp, Probe sequence
ctgacaaataccttagagacatagc

SEQ ID NO: 270381 - DNA, 25 bp, Probe sequence
cgaaatataatgaacctctctttta

SEQ ID NO: 270382 - DNA, 25 bp, Probe sequence
gcaagagaattaaaaggtatacgta

SEQ ID NO: 270383 - DNA, 25 bp, Probe sequence
gagttacaaaagcgaaacgaaacag

SEQ ID NO: 270384 - DNA, 25 bp, Probe sequence
gaaacagttattattgatgcaaact

SEQ ID NO: 270385 - DNA, 25 bp, Probe sequence
gaaatataatgaacctctcttttaa

SEQ ID NO: 270386 - DNA, 25 bp, Probe sequence
gacaaataccttagagacatagcaa

SEQ ID NO: 270387 - DNA, 25 bp, Probe sequence
gagtaatactgacaaataccttaga

SEQ ID NO: 270388 - DNA, 25 bp, Probe sequence
gttattattgatgcaaacttagaca

SEQ ID NO: 270389 - DNA, 25 bp, Probe sequence
gtaatactgacaaataccttagaga

SEQ ID NO: 270390 - DNA, 25 bp, Probe sequence
ggtcggcagtattagccgataaaga

SEQ ID NO: 270391 - DNA, 25 bp, Probe sequence
ggaggatactaatatgagtaatact

SEQ ID NO: 270392 - DNA, 25 bp, Probe sequence
ggcagtattagccgataaagaaaaa

SEQ ID NO: 270393 - DNA, 25 bp, Probe sequence
tgagtaatactgacaaataccttag

SEQ ID NO: 270394 - DNA, 25 bp, Probe sequence
tgacaaataccttagagacatagca

SEQ ID NO: 270395 - DNA, 25 bp, Probe sequence
tcgaaatataatgaacctctctttt

SEQ ID NO: 270396 - DNA, 25 bp, Probe sequence
taatactgacaaataccttagagac

SEQ ID NO: 270397 - DNA, 25 bp, Probe sequence
taaggtcggcagtattagccgataa

SEQ ID NO: 270398 - DNA, 25 bp, Probe sequence
tactgacaaataccttagagacata

SEQ ID NO: 270399 - DNA, 25 bp, Probe sequence
ttattattgatgcaaacttagacag

SEQ ID NO: 270400 - DNA, 25 bp, Probe sequence
attgtatttatcttgctctcactca

SEQ ID NO: 270401 - DNA, 25 bp, Probe sequence
attttggttttttcagcactagctt

SEQ ID NO: 270402 - DNA, 25 bp, Probe sequence
atacctttcgcattgatcatcagtt

SEQ ID NO: 270403 - DNA, 25 bp, Probe sequence
atcggctttttagtgacatgtctct

SEQ ID NO: 270404 - DNA, 25 bp, Probe sequence
aggcgaacagcttttgctgcacgca

SEQ ID NO: 270405 - DNA, 25 bp, Probe sequence
acgaccgcttttactacaggaacag

SEQ ID NO: 270406 - DNA, 25 bp, Probe sequence
actggtctaattacgctgaagcttt

SEQ ID NO: 270407 - DNA, 25 bp, Probe sequence
aactacagattcatccgcatgcgat

SEQ ID NO: 270408 - DNA, 25 bp, Probe sequence
aatgttcacgtcagcagcgtcaggt

SEQ ID NO: 270409 - DNA, 25 bp, Probe sequence
aatccgcaattccacggtgtatcac

SEQ ID NO: 270410 - DNA, 25 bp, Probe sequence
aatcaatctgtatcgttagccttta

SEQ ID NO: 270411 - DNA, 25 bp, Probe sequence
cgttcttacctgacttaatgcttgg

SEQ ID NO: 270412 - DNA, 25 bp, Probe sequence
gcatcacttaggtattgccggtggc

SEQ ID NO: 270413 - DNA, 25 bp, Probe sequence
gctttctttcttagtacatccttta

SEQ ID NO: 270414 - DNA, 25 bp, Probe sequence
gcagcgtcaggttacgccgtatgta

SEQ ID NO: 270415 - DNA, 25 bp, Probe sequence
taatcagtcagggcacaccgcaaac

SEQ ID NO: 270416 - DNA, 25 bp, Probe sequence
gaactcttctacaccttttgaaaat

SEQ ID NO: 270417 - DNA, 25 bp, Probe sequence
gaaacacgtttcggtattggcttat

SEQ ID NO: 270418 - DNA, 25 bp, Probe sequence
gagtttacatcatcttcagcgaata

SEQ ID NO: 270419 - DNA, 25 bp, Probe sequence
gatgaaactcattgcgctttctttc

SEQ ID NO: 270420 - DNA, 25 bp, Probe sequence
gattccaggttcattagtctttcta

SEQ ID NO: 270421 - DNA, 25 bp, Probe sequence
gtcatgttaacggtctttatctgta

SEQ ID NO: 270422 - DNA, 25 bp, Probe sequence
gtggtttcttaggtgcgaactcttc

SEQ ID NO: 270423 - DNA, 25 bp, Probe sequence
gtgtcatcactttcttaatgttcac

SEQ ID NO: 270424 - DNA, 25 bp, Probe sequence
ggcggtgaaggtgttgggctgatga

SEQ ID NO: 270425 - DNA, 25 bp, Probe sequence
ggaccgatggcgtctttagaatcta

SEQ ID NO: 270426 - DNA, 25 bp, Probe sequence
ggcggattgtcctttgtattattgc

SEQ ID NO: 270427 - DNA, 25 bp, Probe sequence
tggcttatccgctttatttacaacc

SEQ ID NO: 270428 - DNA, 25 bp, Probe sequence
tgcggggaatccagtgttgcatcac

SEQ ID NO: 270429 - DNA, 25 bp, Probe sequence
tgttgagcggcttaacgttcttacc

SEQ ID NO: 270430 - DNA, 25 bp, Probe sequence
tacaccgctaggcggcatggttcca

SEQ ID NO: 270431 - DNA, 25 bp, Probe sequence
tattgtacgggtgctcatacctttc

SEQ ID NO: 270432 - DNA, 25 bp, Probe sequence
tatttacaaccattacgaccgcttt

SEQ ID NO: 270433 - DNA, 25 bp, Probe sequence
tatgcacgatagtcttacaccgcta

SEQ ID NO: 270434 - DNA, 25 bp, Probe sequence
attcgccaagaataatacctataaa

SEQ ID NO: 270435 - DNA, 25 bp, Probe sequence
atagcggttttgataaggggagtgt

SEQ ID NO: 270436 - DNA, 25 bp, Probe sequence
atcatacagtcttatctaacggcga

SEQ ID NO: 270437 - DNA, 25 bp, Probe sequence
atgaatgatggttctaatttctcgt

SEQ ID NO: 270438 - DNA, 25 bp, Probe sequence
atggacacaatgatactggtaaagg

SEQ ID NO: 270439 - DNA, 25 bp, Probe sequence
atggcaagcatcaaacagttacaac

SEQ ID NO: 270440 - DNA, 25 bp, Probe sequence
agctataaatatggttctaactctc

SEQ ID NO: 270441 - DNA, 25 bp, Probe sequence
acagtcttatctaacggcgatgtag

SEQ ID NO: 270442 - DNA, 25 bp, Probe sequence
aaatggttaccgcacaagaaataga

SEQ ID NO: 270443 - DNA, 25 bp, Probe sequence
aaaattcaccagaatcacaccgctt

SEQ ID NO: 270444 - DNA, 25 bp, Probe sequence
aatgtcgatgtttttggtataagct

SEQ ID NO: 270445 - DNA, 25 bp, Probe sequence
aatttaattatcaatggcaagcatc

SEQ ID NO: 270446 - DNA, 25 bp, Probe sequence
caactaaaagtgtttctacagataa

SEQ ID NO: 270447 - DNA, 25 bp, Probe sequence
cacaccgcttagaatactcgtataa

SEQ ID NO: 270448 - DNA, 25 bp, Probe sequence
ctaacggcgatgtaggtccaggaaa

SEQ ID NO: 270449 - DNA, 25 bp, Probe sequence
gaatacggcacttcttcaaaatttt

SEQ ID NO: 270450 - DNA, 25 bp, Probe sequence
gaatcacaccgcttagaatactcgt

SEQ ID NO: 270451 - DNA, 25 bp, Probe sequence
gaaaacaataaattagattcgccaa

SEQ ID NO: 270452 - DNA, 25 bp, Probe sequence
gatggttctaatttctcgtatgatt

SEQ ID NO: 270453 - DNA, 25 bp, Probe sequence
gatacggtcttccagaaagcttctt

SEQ ID NO: 270454 - DNA, 25 bp, Probe sequence
gttctaactctcgtactatatatgg

SEQ ID NO: 270455 - DNA, 25 bp, Probe sequence
ggggagtgtagtattccatatgaat

SEQ ID NO: 270456 - DNA, 25 bp, Probe sequence
ggcacttcttcaaaattttatagcg

SEQ ID NO: 270457 - DNA, 25 bp, Probe sequence
tgttgattcaacacaatttcatcta

SEQ ID NO: 270458 - DNA, 25 bp, Probe sequence
tgatacattgtatgctgaatttgac

SEQ ID NO: 270459 - DNA, 25 bp, Probe sequence
tctcgtatgatttattttacacagg

SEQ ID NO: 270460 - DNA, 25 bp, Probe sequence
tcaccagaatcacaccgcttagaat

SEQ ID NO: 270461 - DNA, 25 bp, Probe sequence
tcatctagatgtcgaaatttcaaaa

SEQ ID NO: 270462 - DNA, 25 bp, Probe sequence
tacggtcttccagaaagcttcttaa

SEQ ID NO: 270463 - DNA, 25 bp, Probe sequence
tcaacacaatttcatctagatgtcg

SEQ ID NO: 270464 - DNA, 25 bp, Probe sequence
tatggttctaactctcgtactatat

SEQ ID NO: 270465 - DNA, 25 bp, Probe sequence
tttacacaggatacggtcttccaga

SEQ ID NO: 270466 - DNA, 25 bp, Probe sequence
tttatttattttttcttctaatcat

SEQ ID NO: 270467 - DNA, 25 bp, Probe sequence
ttttttcttctaatcatacagtctt

SEQ ID NO: 270468 - DNA, 25 bp, Probe sequence
aggttcgagcggtaagtctcacggc

SEQ ID NO: 270469 - DNA, 25 bp, Probe sequence
agatgagttaagacatttaccttct

SEQ ID NO: 270470 - DNA, 25 bp, Probe sequence
acaaagttgaattgccaaacggcgc

SEQ ID NO: 270471 - DNA, 25 bp, Probe sequence
acttcactgaagtacattacggtgg

SEQ ID NO: 270472 - DNA, 25 bp, Probe sequence
acattacggtggaggttcgagcggt

SEQ ID NO: 270473 - DNA, 25 bp, Probe sequence
acaatcattgtatcgattcgttgcg

SEQ ID NO: 270474 - DNA, 25 bp, Probe sequence
aaggcatatcagacatagtcatgga

SEQ ID NO: 270475 - DNA, 25 bp, Probe sequence
caagggttacaattcttaatgcaat

SEQ ID NO: 270476 - DNA, 25 bp, Probe sequence
cagaccggttagaaaacgcacaaat

SEQ ID NO: 270477 - DNA, 25 bp, Probe sequence
gcgttaggtgaatttgctacactag

SEQ ID NO: 270478 - DNA, 25 bp, Probe sequence
gaagagtttgacaactacacatggc

SEQ ID NO: 270479 - DNA, 25 bp, Probe sequence
gaaccagtagatacatacaatcatt

SEQ ID NO: 270480 - DNA, 25 bp, Probe sequence
gaaatgacacgacaaaacttagagt

SEQ ID NO: 270481 - DNA, 25 bp, Probe sequence
gacaactacacatggcaaaaggaca

SEQ ID NO: 270482 - DNA, 25 bp, Probe sequence
gacatgtgcctttggaataagactg

SEQ ID NO: 270483 - DNA, 25 bp, Probe sequence
gacatttaccttcttattttggatt

SEQ ID NO: 270484 - DNA, 25 bp, Probe sequence
gatgaacgttgtttcaagactattg

SEQ ID NO: 270485 - DNA, 25 bp, Probe sequence
gattcgttgcgttattcagtggaac

SEQ ID NO: 270486 - DNA, 25 bp, Probe sequence
gttgttagcaaatcgtaatccagca

SEQ ID NO: 270487 - DNA, 25 bp, Probe sequence
gttgacacaataaaatctctaggat

SEQ ID NO: 270488 - DNA, 25 bp, Probe sequence
gtatttctttgaacatggtgaacca

SEQ ID NO: 270489 - DNA, 25 bp, Probe sequence
ggctcggttgtacaagggttacaat

SEQ ID NO: 270490 - DNA, 25 bp, Probe sequence
gtggaacgattctacagaccggtta

SEQ ID NO: 270491 - DNA, 25 bp, Probe sequence
gggagcgtaaacacgtgaataagca

SEQ ID NO: 270492 - DNA, 25 bp, Probe sequence
ggtatttgggacatgtgcctttgga

SEQ ID NO: 270493 - DNA, 25 bp, Probe sequence
ggaagaagcgtctgaattcacacta

SEQ ID NO: 270494 - DNA, 25 bp, Probe sequence
ggctacgttaatgatcctagtgctt

SEQ ID NO: 270495 - DNA, 25 bp, Probe sequence
tgccaaacggcgcagtttttttgtt

SEQ ID NO: 270496 - DNA, 25 bp, Probe sequence
tgatcctagtgcttttatacattct

SEQ ID NO: 270497 - DNA, 25 bp, Probe sequence
tcacactaaatgattacacgcaatt

SEQ ID NO: 270498 - DNA, 25 bp, Probe sequence
taaccaattacgataacttcactga

SEQ ID NO: 270499 - DNA, 25 bp, Probe sequence
tttggattggactttggctacgtta

SEQ ID NO: 270500 - DNA, 25 bp, Probe sequence
ttttgatgtttaacccagtatctaa

SEQ ID NO: 270501 - DNA, 25 bp, Probe sequence
ttaacgttgcgtttgagggagcgta

SEQ ID NO: 270502 - DNA, 25 bp, Probe sequence
atatgaccatttaaacgatgaagtg

SEQ ID NO: 270503 - DNA, 25 bp, Probe sequence
atagcgcgagagttggtggtaaatg

SEQ ID NO: 270504 - DNA, 25 bp, Probe sequence
atcacaccaacttttgaagagcgtc

SEQ ID NO: 270505 - DNA, 25 bp, Probe sequence
agctttagcgttatctgcttctatt

SEQ ID NO: 270506 - DNA, 25 bp, Probe sequence
acaccaacttttgaagagcgtcaga

SEQ ID NO: 270507 - DNA, 25 bp, Probe sequence
acagcagagtctttagcaagtcgat

SEQ ID NO: 270508 - DNA, 25 bp, Probe sequence
aaatgttaatgtttcggaatatatt

SEQ ID NO: 270509 - DNA, 25 bp, Probe sequence
aaaacaaaagagattcgcagatgaa

SEQ ID NO: 270510 - DNA, 25 bp, Probe sequence
aagaacgattagaacagatacaaga

SEQ ID NO: 270511 - DNA, 25 bp, Probe sequence
aagaggttacttacacaatcacacc

SEQ ID NO: 270512 - DNA, 25 bp, Probe sequence
cagagatctattgaccacatactaa

SEQ ID NO: 270513 - DNA, 25 bp, Probe sequence
gcgcgagagttggtggtaaatgaaa

SEQ ID NO: 270514 - DNA, 25 bp, Probe sequence
gcgtatagcgcgagagttggtggta

SEQ ID NO: 270515 - DNA, 25 bp, Probe sequence
gcgttatctgcttctattgctagag

SEQ ID NO: 270516 - DNA, 25 bp, Probe sequence
gcttctattgctagaggagaacctc

SEQ ID NO: 270517 - DNA, 25 bp, Probe sequence
gcttacagtaagaaatatgaccatt

SEQ ID NO: 270518 - DNA, 25 bp, Probe sequence
gcaagtcgattgttaagaaatgtta

SEQ ID NO: 270519 - DNA, 25 bp, Probe sequence
gaagagcgtttaatgagtattacag

SEQ ID NO: 270520 - DNA, 25 bp, Probe sequence
gaacctcaagaggcttacagtaaga

SEQ ID NO: 270521 - DNA, 25 bp, Probe sequence
gaaaacagcagagtctttagcaagt

SEQ ID NO: 270522 - DNA, 25 bp, Probe sequence
gagcgtcagagatctattgaccaca

SEQ ID NO: 270523 - DNA, 25 bp, Probe sequence
gagtctttagcaagtcgattgttaa

SEQ ID NO: 270524 - DNA, 25 bp, Probe sequence
gaggagaacctcaagaggcttacag

SEQ ID NO: 270525 - DNA, 25 bp, Probe sequence
gatctattgaccacatactaaaagt

SEQ ID NO: 270526 - DNA, 25 bp, Probe sequence
gatacaagaagagcgtttaatgagt

SEQ ID NO: 270527 - DNA, 25 bp, Probe sequence
gattatagccaatcccttttttaat

SEQ ID NO: 270528 - DNA, 25 bp, Probe sequence
gggttggctgattatagccaatccc

SEQ ID NO: 270529 - DNA, 25 bp, Probe sequence
ggttacttacacaatcacaccaact

SEQ ID NO: 270530 - DNA, 25 bp, Probe sequence
ggctgattatagccaatcccttttt

SEQ ID NO: 270531 - DNA, 25 bp, Probe sequence
tgagtattacagaagctttagcgtt

SEQ ID NO: 270532 - DNA, 25 bp, Probe sequence
tacacaatcacaccaacttttgaag

SEQ ID NO: 270533 - DNA, 25 bp, Probe sequence
tacttacacaatcacaccaactttt

SEQ ID NO: 270534 - DNA, 25 bp, Probe sequence
tatctgcttctattgctagaggaga

SEQ ID NO: 270535 - DNA, 25 bp, Probe sequence
tttagcgttatctgcttctattgct

SEQ ID NO: 270536 - DNA, 25 bp, Probe sequence
attttgcttttctcatcaataggag

SEQ ID NO: 270537 - DNA, 25 bp, Probe sequence
atattttgcttttctcatcaatagg

SEQ ID NO: 270538 - DNA, 25 bp, Probe sequence
ataggagttatcgacggagattatt

SEQ ID NO: 270539 - DNA, 25 bp, Probe sequence
atcaataggagttatcgacggagat

SEQ ID NO: 270540 - DNA, 25 bp, Probe sequence
atcgacggagattatttagcaggtt

SEQ ID NO: 270541 - DNA, 25 bp, Probe sequence
aggagttatcgacggagattattta

SEQ ID NO: 270542 - DNA, 25 bp, Probe sequence
aaaaagcggcagaattgtatgaatt

SEQ ID NO: 270543 - DNA, 25 bp, Probe sequence
aaaaaagcggcagaattgtatgaat

SEQ ID NO: 270544 - DNA, 25 bp, Probe sequence
aagcggcagaattgtatgaattagc

SEQ ID NO: 270545 - DNA, 25 bp, Probe sequence
caataggagttatcgacggagatta

SEQ ID NO: 270546 - DNA, 25 bp, Probe sequence
catcaataggagttatcgacggaga

SEQ ID NO: 270547 - DNA, 25 bp, Probe sequence
cgacggagattatttagcaggttca

SEQ ID NO: 270548 - DNA, 25 bp, Probe sequence
gcggcagaattgtatgaattagcga

SEQ ID NO: 270549 - DNA, 25 bp, Probe sequence
gcttttctcatcaataggagttatc

SEQ ID NO: 270550 - DNA, 25 bp, Probe sequence
gacggagattatttagcaggttcaa

SEQ ID NO: 270551 - DNA, 25 bp, Probe sequence
gagttatcgacggagattatttagc

SEQ ID NO: 270552 - DNA, 25 bp, Probe sequence
gatattttgcttttctcatcaatag

SEQ ID NO: 270553 - DNA, 25 bp, Probe sequence
gttatcgacggagattatttagcag

SEQ ID NO: 270554 - DNA, 25 bp, Probe sequence
gtaaatttgatattttgcttttctc

SEQ ID NO: 270555 - DNA, 25 bp, Probe sequence
ggcagaattgtatgaattagcgaaa

SEQ ID NO: 270556 - DNA, 25 bp, Probe sequence
tcgacggagattatttagcaggttc

SEQ ID NO: 270557 - DNA, 25 bp, Probe sequence
tggatagcactaagagttataaaga

SEQ ID NO: 270558 - DNA, 25 bp, Probe sequence
tgatattttgcttttctcatcaata

SEQ ID NO: 270559 - DNA, 25 bp, Probe sequence
tgcttttctcatcaataggagttat

SEQ ID NO: 270560 - DNA, 25 bp, Probe sequence
tcatcaataggagttatcgacggag

SEQ ID NO: 270561 - DNA, 25 bp, Probe sequence
taggagttatcgacggagattattt

SEQ ID NO: 270562 - DNA, 25 bp, Probe sequence
tattttgcttttctcatcaatagga

SEQ ID NO: 270563 - DNA, 25 bp, Probe sequence
tttgcttttctcatcaataggagtt

SEQ ID NO: 270564 - DNA, 25 bp, Probe sequence
ttattggatagcactaagagttata

SEQ ID NO: 270565 - DNA, 25 bp, Probe sequence
ttttctcatcaataggagttatcga

SEQ ID NO: 270566 - DNA, 25 bp, Probe sequence
ttttgcttttctcatcaataggagt

SEQ ID NO: 270567 - DNA, 25 bp, Probe sequence
ttctcatcaataggagttatcgacg

SEQ ID NO: 270568 - DNA, 25 bp, Probe sequence
ttgcttttctcatcaataggagtta

SEQ ID NO: 270569 - DNA, 25 bp, Probe sequence
ttgatattttgcttttctcatcaat

SEQ ID NO: 270570 - DNA, 25 bp, Probe sequence
ggtaaggcgactgaagttgccaaca

SEQ ID NO: 270571 - DNA, 25 bp, Probe sequence
attcagatatcagtatagagatgtg

SEQ ID NO: 270572 - DNA, 25 bp, Probe sequence
atatagccgatttctctttgtggaa

SEQ ID NO: 270573 - DNA, 25 bp, Probe sequence
atagccgatttctctttgtggaagg

SEQ ID NO: 270574 - DNA, 25 bp, Probe sequence
acgtatatagccgatttctctttgt

SEQ ID NO: 270575 - DNA, 25 bp, Probe sequence
acgtggatatgtaaagcgcctaaat

SEQ ID NO: 270576 - DNA, 25 bp, Probe sequence
acatcaaagcgaagatattcagata

SEQ ID NO: 270577 - DNA, 25 bp, Probe sequence
aagcgcctaaatacacaggtcaaga

SEQ ID NO: 270578 - DNA, 25 bp, Probe sequence
aagaccgattacgtatatagccgat

SEQ ID NO: 270579 - DNA, 25 bp, Probe sequence
aaggcgactgaagttgccaacatca

SEQ ID NO: 270580 - DNA, 25 bp, Probe sequence
aatacacaggtcaagaatggatggt

SEQ ID NO: 270581 - DNA, 25 bp, Probe sequence
caaagaccgattacgtatatagccg

SEQ ID NO: 270582 - DNA, 25 bp, Probe sequence
gccgatttctctttgtggaaggaag

SEQ ID NO: 270583 - DNA, 25 bp, Probe sequence
gaatggatggtatatgaggacttag

SEQ ID NO: 270584 - DNA, 25 bp, Probe sequence
gaagttgccaacatcaaagcgaaga

SEQ ID NO: 270585 - DNA, 25 bp, Probe sequence
gaaactggttgaagttatagacgtt

SEQ ID NO: 270586 - DNA, 25 bp, Probe sequence
gactgaagttgccaacatcaaagcg

SEQ ID NO: 270587 - DNA, 25 bp, Probe sequence
gaccgattacgtatatagccgattt

SEQ ID NO: 270588 - DNA, 25 bp, Probe sequence
gagatgtgaatttaacgtggatatg

SEQ ID NO: 270589 - DNA, 25 bp, Probe sequence
gaggacttagtgaaagtcagacgta

SEQ ID NO: 270590 - DNA, 25 bp, Probe sequence
gaggtggcacaatgagtaaatacaa

SEQ ID NO: 270591 - DNA, 25 bp, Probe sequence
tagacgttaaaggtaaggcgactga

SEQ ID NO: 270592 - DNA, 25 bp, Probe sequence
gatttctctttgtggaaggaaggga

SEQ ID NO: 270593 - DNA, 25 bp, Probe sequence
gattacgtatatagccgatttctct

SEQ ID NO: 270594 - DNA, 25 bp, Probe sequence
gttgccaacatcaaagcgaagatat

SEQ ID NO: 270595 - DNA, 25 bp, Probe sequence
gtatatagccgatttctctttgtgg

SEQ ID NO: 270596 - DNA, 25 bp, Probe sequence
gtaaagcgcctaaatacacaggtca

SEQ ID NO: 270597 - DNA, 25 bp, Probe sequence
ggatggtatatgaggacttagtgaa

SEQ ID NO: 270598 - DNA, 25 bp, Probe sequence
tggaaggaagggaaactggttgaag

SEQ ID NO: 270599 - DNA, 25 bp, Probe sequence
ggcgactgaagttgccaacatcaaa

SEQ ID NO: 270600 - DNA, 25 bp, Probe sequence
tagccgatttctctttgtggaagga

SEQ ID NO: 270601 - DNA, 25 bp, Probe sequence
ttacgtatatagccgatttctcttt

SEQ ID NO: 270602 - DNA, 25 bp, Probe sequence
ttaacgtggatatgtaaagcgccta

SEQ ID NO: 270603 - DNA, 25 bp, Probe sequence
ttgatatttagaggtggcacaatga

SEQ ID NO: 270604 - DNA, 25 bp, Probe sequence
attgaaatcgatgtatgaagagaca

SEQ ID NO: 270605 - DNA, 25 bp, Probe sequence
attcaaaagcttattgaaatcgatg

SEQ ID NO: 270606 - DNA, 25 bp, Probe sequence
ataacgagttatcgcctttcgatga

SEQ ID NO: 270607 - DNA, 25 bp, Probe sequence
atcgatgtatgaagagacaaagcaa

SEQ ID NO: 270608 - DNA, 25 bp, Probe sequence
atgcaattcaaaagcttattgaaat

SEQ ID NO: 270609 - DNA, 25 bp, Probe sequence
agcttattgaaatcgatgtatgaag

SEQ ID NO: 270610 - DNA, 25 bp, Probe sequence
acgagttatcgcctttcgatgatta

SEQ ID NO: 270611 - DNA, 25 bp, Probe sequence
acaataacgagttatcgcctttcga

SEQ ID NO: 270612 - DNA, 25 bp, Probe sequence
aaatcgatgtatgaagagacaaagc

SEQ ID NO: 270613 - DNA, 25 bp, Probe sequence
aaagcttattgaaatcgatgtatga

SEQ ID NO: 270614 - DNA, 25 bp, Probe sequence
aaaagcttattgaaatcgatgtatg

SEQ ID NO: 270615 - DNA, 25 bp, Probe sequence
aacgagttatcgcctttcgatgatt

SEQ ID NO: 270616 - DNA, 25 bp, Probe sequence
aagcttattgaaatcgatgtatgaa

SEQ ID NO: 270617 - DNA, 25 bp, Probe sequence
aatcgatgtatgaagagacaaagca

SEQ ID NO: 270618 - DNA, 25 bp, Probe sequence
aataacgagttatcgcctttcgatg

SEQ ID NO: 270619 - DNA, 25 bp, Probe sequence
aattcaaaagcttattgaaatcgat

SEQ ID NO: 270620 - DNA, 25 bp, Probe sequence
caataacgagttatcgcctttcgat

SEQ ID NO: 270621 - DNA, 25 bp, Probe sequence
caattcaaaagcttattgaaatcga

SEQ ID NO: 270622 - DNA, 25 bp, Probe sequence
caaaagcttattgaaatcgatgtat

SEQ ID NO: 270623 - DNA, 25 bp, Probe sequence
cttattgaaatcgatgtatgaagag

SEQ ID NO: 270624 - DNA, 25 bp, Probe sequence
gcttattgaaatcgatgtatgaaga

SEQ ID NO: 270625 - DNA, 25 bp, Probe sequence
gcaattcaaaagcttattgaaatcg

SEQ ID NO: 270626 - DNA, 25 bp, Probe sequence
gaaatcgatgtatgaagagacaaag

SEQ ID NO: 270627 - DNA, 25 bp, Probe sequence
gacaataacgagttatcgcctttcg

SEQ ID NO: 270628 - DNA, 25 bp, Probe sequence
tgaaatcgatgtatgaagagacaaa

SEQ ID NO: 270629 - DNA, 25 bp, Probe sequence
tgaatgaaatcaactggaagaaaac

SEQ ID NO: 270630 - DNA, 25 bp, Probe sequence
tgcaattcaaaagcttattgaaatc

SEQ ID NO: 270631 - DNA, 25 bp, Probe sequence
tcgatgtatgaagagacaaagcaaa

SEQ ID NO: 270632 - DNA, 25 bp, Probe sequence
tcaaaagcttattgaaatcgatgta

SEQ ID NO: 270633 - DNA, 25 bp, Probe sequence
taacgagttatcgcctttcgatgat

SEQ ID NO: 270634 - DNA, 25 bp, Probe sequence
tattgaaatcgatgtatgaagagac

SEQ ID NO: 270635 - DNA, 25 bp, Probe sequence
ttattgaaatcgatgtatgaagaga

SEQ ID NO: 270636 - DNA, 25 bp, Probe sequence
ttgaaatcgatgtatgaagagacaa

SEQ ID NO: 270637 - DNA, 25 bp, Probe sequence
ataaaagtaatatcacaccgcaaga

SEQ ID NO: 270638 - DNA, 25 bp, Probe sequence
atgctactttaccgtgatgattatt

SEQ ID NO: 270639 - DNA, 25 bp, Probe sequence
acgtatgttatcaacaattactggt

SEQ ID NO: 270640 - DNA, 25 bp, Probe sequence
acatctttctttagtctcgaaacaa

SEQ ID NO: 270641 - DNA, 25 bp, Probe sequence
acaattaatcgtcatcgcagcgcgt

SEQ ID NO: 270642 - DNA, 25 bp, Probe sequence
aaatggatacaaaacatctttcttt

SEQ ID NO: 270643 - DNA, 25 bp, Probe sequence
aaagctaacgaattggtaactgagt

SEQ ID NO: 270644 - DNA, 25 bp, Probe sequence
aactgagttcaaacaacaacctacg

SEQ ID NO: 270645 - DNA, 25 bp, Probe sequence
aatcgctaacgagacaggcgcaatc

SEQ ID NO: 270646 - DNA, 25 bp, Probe sequence
aattaggcatcgatatttctgataa

SEQ ID NO: 270647 - DNA, 25 bp, Probe sequence
caactgatggatactgatgcgaaag

SEQ ID NO: 270648 - DNA, 25 bp, Probe sequence
cacaccgcaagatgtgcgagcgcaa

SEQ ID NO: 270649 - DNA, 25 bp, Probe sequence
caggaacttaacgccggatgactta

SEQ ID NO: 270650 - DNA, 25 bp, Probe sequence
ccggcacatcggtattgaaacgtat

SEQ ID NO: 270651 - DNA, 25 bp, Probe sequence
ccatcacaattaatcgtcatcgcag

SEQ ID NO: 270652 - DNA, 25 bp, Probe sequence
gcgagcgcaagcaatgaggcattca

SEQ ID NO: 270653 - DNA, 25 bp, Probe sequence
gcgcgtccctcagtgggtaagacag

SEQ ID NO: 270654 - DNA, 25 bp, Probe sequence
gcgatagccctaagaagcaaattaa

SEQ ID NO: 270655 - DNA, 25 bp, Probe sequence
gaagagttatacagcgatagcccta

SEQ ID NO: 270656 - DNA, 25 bp, Probe sequence
gaaagttgatagacgtgtagcagta

SEQ ID NO: 270657 - DNA, 25 bp, Probe sequence
gaaatcaggaacttaacgccggatg

SEQ ID NO: 270658 - DNA, 25 bp, Probe sequence
gacgggttacaagctaatggattac

SEQ ID NO: 270659 - DNA, 25 bp, Probe sequence
gacggcgaaaccggaataattgaat

SEQ ID NO: 270660 - DNA, 25 bp, Probe sequence
gaccaatgctatcggacatgaaaga

SEQ ID NO: 270661 - DNA, 25 bp, Probe sequence
gatggaaccaagaagtttgttgagg

SEQ ID NO: 270662 - DNA, 25 bp, Probe sequence
gatgcagatactataactaaacttt

SEQ ID NO: 270663 - DNA, 25 bp, Probe sequence
gtttgttgaggagtttgtcgaagag

SEQ ID NO: 270664 - DNA, 25 bp, Probe sequence
gtactactttcacaactgaatcgtg

SEQ ID NO: 270665 - DNA, 25 bp, Probe sequence
gtgatgattattataaccgtgacga

SEQ ID NO: 270666 - DNA, 25 bp, Probe sequence
tggacgtcggaaagatagatcatca

SEQ ID NO: 270667 - DNA, 25 bp, Probe sequence
taaccgtgacgaagatgacagtatc

SEQ ID NO: 270668 - DNA, 25 bp, Probe sequence
taacgccggatgacttaacaaagtt

SEQ ID NO: 270669 - DNA, 25 bp, Probe sequence
taaaacctttttcaattatgtaatg

SEQ ID NO: 270670 - DNA, 25 bp, Probe sequence
ttagtctcgaaacaaccggcacatc

SEQ ID NO: 270671 - DNA, 25 bp, Probe sequence
aataagttggcagaatttgggggcg

SEQ ID NO: 270672 - DNA, 25 bp, Probe sequence
ataagttggcagaatttgggggcga

SEQ ID NO: 270673 - DNA, 25 bp, Probe sequence
atgcagaatgaccccgaatatgtca

SEQ ID NO: 270674 - DNA, 25 bp, Probe sequence
atggaaaatgcagaatgaccccgaa

SEQ ID NO: 270675 - DNA, 25 bp, Probe sequence
acaccaatggaaaatgcagaatgac

SEQ ID NO: 270676 - DNA, 25 bp, Probe sequence
acacaccaatggaaaatgcagaatg

SEQ ID NO: 270677 - DNA, 25 bp, Probe sequence
aaatgcagaatgaccccgaatatgt

SEQ ID NO: 270678 - DNA, 25 bp, Probe sequence
aaatgtggattgatgtattaagtca

SEQ ID NO: 270679 - DNA, 25 bp, Probe sequence
aaaatgcagaatgaccccgaatatg

SEQ ID NO: 270680 - DNA, 25 bp, Probe sequence
aaacacaagcattagaaattattaa

SEQ ID NO: 270681 - DNA, 25 bp, Probe sequence
aacttaccagcaatcatgcgtaagg

SEQ ID NO: 270682 - DNA, 25 bp, Probe sequence
aagttagaaatgtggattgatgtat

SEQ ID NO: 270683 - DNA, 25 bp, Probe sequence
aatggaaaatgcagaatgaccccga

SEQ ID NO: 270684 - DNA, 25 bp, Probe sequence
aatgcagaatgaccccgaatatgtc

SEQ ID NO: 270685 - DNA, 25 bp, Probe sequence
caatggaaaatgcagaatgaccccg

SEQ ID NO: 270686 - DNA, 25 bp, Probe sequence
ctaacttaccagcaatcatgcgtaa

SEQ ID NO: 270687 - DNA, 25 bp, Probe sequence
cctaacttaccagcaatcatgcgta

SEQ ID NO: 270688 - DNA, 25 bp, Probe sequence
ccgatgagcaaaacacaagcattag

SEQ ID NO: 270689 - DNA, 25 bp, Probe sequence
cgcctaacttaccagcaatcatgcg

SEQ ID NO: 270690 - DNA, 25 bp, Probe sequence
gcctaacttaccagcaatcatgcgt

SEQ ID NO: 270691 - DNA, 25 bp, Probe sequence
gccgatgagcaaaacacaagcatta

SEQ ID NO: 270692 - DNA, 25 bp, Probe sequence
gctacacaccaatggaaaatgcaga

SEQ ID NO: 270693 - DNA, 25 bp, Probe sequence
gaataagttggcagaatttgggggc

SEQ ID NO: 270694 - DNA, 25 bp, Probe sequence
gcaaaacacaagcattagaaattat

SEQ ID NO: 270695 - DNA, 25 bp, Probe sequence
gaaaatgcagaatgaccccgaatat

SEQ ID NO: 270696 - DNA, 25 bp, Probe sequence
gaaatgtggattgatgtattaagtc

SEQ ID NO: 270697 - DNA, 25 bp, Probe sequence
gagcaaaacacaagcattagaaatt

SEQ ID NO: 270698 - DNA, 25 bp, Probe sequence
gatgagcaaaacacaagcattagaa

SEQ ID NO: 270699 - DNA, 25 bp, Probe sequence
tggaaaatgcagaatgaccccgaat

SEQ ID NO: 270700 - DNA, 25 bp, Probe sequence
ggaaaatgcagaatgaccccgaata

SEQ ID NO: 270701 - DNA, 25 bp, Probe sequence
tgtggattgatgtattaagtcaaaa

SEQ ID NO: 270702 - DNA, 25 bp, Probe sequence
tgagcaaaacacaagcattagaaat

SEQ ID NO: 270703 - DNA, 25 bp, Probe sequence
tgccgatgagcaaaacacaagcatt

SEQ ID NO: 270704 - DNA, 25 bp, Probe sequence
taacttaccagcaatcatgcgtaag

SEQ ID NO: 270705 - DNA, 25 bp, Probe sequence
atatcgaagctttacccgaaagaga

SEQ ID NO: 270706 - DNA, 25 bp, Probe sequence
ataaattgcgacaacaacgctatcg

SEQ ID NO: 270707 - DNA, 25 bp, Probe sequence
ataaggttagcaattcaaacttttg

SEQ ID NO: 270708 - DNA, 25 bp, Probe sequence
atcaaatatatcgaagctttacccg

SEQ ID NO: 270709 - DNA, 25 bp, Probe sequence
aggaaagtacaatgaacaaggttat

SEQ ID NO: 270710 - DNA, 25 bp, Probe sequence
acgatcataactatttgggttaagt

SEQ ID NO: 270711 - DNA, 25 bp, Probe sequence
acttgccgtacaacgaagaaatgtt

SEQ ID NO: 270712 - DNA, 25 bp, Probe sequence
aaagcaaaagtgcgcatggtggcta

SEQ ID NO: 270713 - DNA, 25 bp, Probe sequence
aacttaaagttggcatgtttgatga

SEQ ID NO: 270714 - DNA, 25 bp, Probe sequence
aagttggcatgtttgatgacagcaa

SEQ ID NO: 270715 - DNA, 25 bp, Probe sequence
aattagggtttgctattgatgatat

SEQ ID NO: 270716 - DNA, 25 bp, Probe sequence
caactgggctaaagagaatgtcaaa

SEQ ID NO: 270717 - DNA, 25 bp, Probe sequence
caaacttttgagacattgggcatga

SEQ ID NO: 270718 - DNA, 25 bp, Probe sequence
ggagaagcatcaaagcttagatagc

SEQ ID NO: 270719 - DNA, 25 bp, Probe sequence
gccgtcttctcatcttcaataaaat

SEQ ID NO: 270720 - DNA, 25 bp, Probe sequence
gctatccgaaaacttgccgtacaac

SEQ ID NO: 270721 - DNA, 25 bp, Probe sequence
gaagttgtaaaagtaggtgttgagt

SEQ ID NO: 270722 - DNA, 25 bp, Probe sequence
gaacaaggttatattatgctatccg

SEQ ID NO: 270723 - DNA, 25 bp, Probe sequence
gacaaactgggagaagcatcaaagc

SEQ ID NO: 270724 - DNA, 25 bp, Probe sequence
gaaagagaagccgtcttctcatctt

SEQ ID NO: 270725 - DNA, 25 bp, Probe sequence
gacctattaactcaataaggttagc

SEQ ID NO: 270726 - DNA, 25 bp, Probe sequence
gagaagccgtcttctcatcttcaat

SEQ ID NO: 270727 - DNA, 25 bp, Probe sequence
gagacattgggcatgattgaaaaag

SEQ ID NO: 270728 - DNA, 25 bp, Probe sequence
gagatacgatcataactatttgggt

SEQ ID NO: 270729 - DNA, 25 bp, Probe sequence
gtaggtgttgagtacactaaaagca

SEQ ID NO: 270730 - DNA, 25 bp, Probe sequence
gtaacgttacgtaacgatacagaag

SEQ ID NO: 270731 - DNA, 25 bp, Probe sequence
gtcttctcatcttcaataaaatata

SEQ ID NO: 270732 - DNA, 25 bp, Probe sequence
ggtttgctattgatgatataggtac

SEQ ID NO: 270733 - DNA, 25 bp, Probe sequence
ggcatgtttgatgacagcaaaatca

SEQ ID NO: 270734 - DNA, 25 bp, Probe sequence
tccgaaaacttgccgtacaacgaag

SEQ ID NO: 270735 - DNA, 25 bp, Probe sequence
taatagacctattaactcaataagg

SEQ ID NO: 270736 - DNA, 25 bp, Probe sequence
tatgctatccgaaaacttgccgtac

SEQ ID NO: 270737 - DNA, 25 bp, Probe sequence
tttacccgaaagagatacgatcata

SEQ ID NO: 270738 - DNA, 25 bp, Probe sequence
ttgcaaatttggatgataagttaac

SEQ ID NO: 270739 - DNA, 25 bp, Probe sequence
attgaacgagtacagaaaacttatt

SEQ ID NO: 270740 - DNA, 25 bp, Probe sequence
attgacagtaacaatcacattgaac

SEQ ID NO: 270741 - DNA, 25 bp, Probe sequence
atcacattgaacgagtacagaaaac

SEQ ID NO: 270742 - DNA, 25 bp, Probe sequence
agtaacaatcacattgaacgagtac

SEQ ID NO: 270743 - DNA, 25 bp, Probe sequence
agaattgacagtaacaatcacattg

SEQ ID NO: 270744 - DNA, 25 bp, Probe sequence
acgagtacagaaaacttattgaaat

SEQ ID NO: 270745 - DNA, 25 bp, Probe sequence
acattgaacgagtacagaaaactta

SEQ ID NO: 270746 - DNA, 25 bp, Probe sequence
acagtaacaatcacattgaacgagt

SEQ ID NO: 270747 - DNA, 25 bp, Probe sequence
acaatcacattgaacgagtacagaa

SEQ ID NO: 270748 - DNA, 25 bp, Probe sequence
aacaatcacattgaacgagtacaga

SEQ ID NO: 270749 - DNA, 25 bp, Probe sequence
aacaacattattacactaaagattt

SEQ ID NO: 270750 - DNA, 25 bp, Probe sequence
aagaattgacagtaacaatcacatt

SEQ ID NO: 270751 - DNA, 25 bp, Probe sequence
aatcacattgaacgagtacagaaaa

SEQ ID NO: 270752 - DNA, 25 bp, Probe sequence
aattgacagtaacaatcacattgaa

SEQ ID NO: 270753 - DNA, 25 bp, Probe sequence
caatcacattgaacgagtacagaaa

SEQ ID NO: 270754 - DNA, 25 bp, Probe sequence
cagtaacaatcacattgaacgagta

SEQ ID NO: 270755 - DNA, 25 bp, Probe sequence
cacattgaacgagtacagaaaactt

SEQ ID NO: 270756 - DNA, 25 bp, Probe sequence
cattgaacgagtacagaaaacttat

SEQ ID NO: 270757 - DNA, 25 bp, Probe sequence
cttattgaaataaaggctgttaaag

SEQ ID NO: 270758 - DNA, 25 bp, Probe sequence
gaattgacagtaacaatcacattga

SEQ ID NO: 270759 - DNA, 25 bp, Probe sequence
gaacgagtacagaaaacttattgaa

SEQ ID NO: 270760 - DNA, 25 bp, Probe sequence
gaacaacattattacactaaagatt

SEQ ID NO: 270761 - DNA, 25 bp, Probe sequence
gaaataaaggctgttaaagataaag

SEQ ID NO: 270762 - DNA, 25 bp, Probe sequence
gacagtaacaatcacattgaacgag

SEQ ID NO: 270763 - DNA, 25 bp, Probe sequence
gagtacagaaaacttattgaaataa

SEQ ID NO: 270764 - DNA, 25 bp, Probe sequence
gtagcaaatcaagaattgacagtaa

SEQ ID NO: 270765 - DNA, 25 bp, Probe sequence
gtaacaatcacattgaacgagtaca

SEQ ID NO: 270766 - DNA, 25 bp, Probe sequence
ttgaacgagtacagaaaacttattg

SEQ ID NO: 270767 - DNA, 25 bp, Probe sequence
tgacagtaacaatcacattgaacga

SEQ ID NO: 270768 - DNA, 25 bp, Probe sequence
tgaacgagtacagaaaacttattga

SEQ ID NO: 270769 - DNA, 25 bp, Probe sequence
tcacattgaacgagtacagaaaact

SEQ ID NO: 270770 - DNA, 25 bp, Probe sequence
taacaatcacattgaacgagtacag

SEQ ID NO: 270771 - DNA, 25 bp, Probe sequence
ttgacagtaacaatcacattgaacg

SEQ ID NO: 270772 - DNA, 25 bp, Probe sequence
ttgtagcaaatcaagaattgacagt

SEQ ID NO: 270773 - DNA, 25 bp, Probe sequence
attttatctgtttctaaatccaaag

SEQ ID NO: 270774 - DNA, 25 bp, Probe sequence
atagtttgcaagctaaagaacttgc

SEQ ID NO: 270775 - DNA, 25 bp, Probe sequence
atctgtttctaaatccaaagcagga

SEQ ID NO: 270776 - DNA, 25 bp, Probe sequence
agagaataatggaggagttgaaaaa

SEQ ID NO: 270777 - DNA, 25 bp, Probe sequence
agagaactgaataaagagcttgaag

SEQ ID NO: 270778 - DNA, 25 bp, Probe sequence
aaatagtttgcaagctaaagaactt

SEQ ID NO: 270779 - DNA, 25 bp, Probe sequence
aaatccaaagcaggacaaataataa

SEQ ID NO: 270780 - DNA, 25 bp, Probe sequence
aaagcaggacaaataataagagaac

SEQ ID NO: 270781 - DNA, 25 bp, Probe sequence
aaaatagtttgcaagctaaagaact

SEQ ID NO: 270782 - DNA, 25 bp, Probe sequence
aagcaggacaaataataagagaact

SEQ ID NO: 270783 - DNA, 25 bp, Probe sequence
aatccaaagcaggacaaataataag

SEQ ID NO: 270784 - DNA, 25 bp, Probe sequence
aatagtttgcaagctaaagaacttg

SEQ ID NO: 270785 - DNA, 25 bp, Probe sequence
caaagcaggacaaataataagagaa

SEQ ID NO: 270786 - DNA, 25 bp, Probe sequence
ctaaatccaaagcaggacaaataat

SEQ ID NO: 270787 - DNA, 25 bp, Probe sequence
ctgtttctaaatccaaagcaggaca

SEQ ID NO: 270788 - DNA, 25 bp, Probe sequence
ccaaagcaggacaaataataagaga

SEQ ID NO: 270789 - DNA, 25 bp, Probe sequence
gaataatggaggagttgaaaaaaga

SEQ ID NO: 270790 - DNA, 25 bp, Probe sequence
gagaataatggaggagttgaaaaaa

SEQ ID NO: 270791 - DNA, 25 bp, Probe sequence
gagaactgaataaagagcttgaaga

SEQ ID NO: 270792 - DNA, 25 bp, Probe sequence
gtttctaaatccaaagcaggacaaa

SEQ ID NO: 270793 - DNA, 25 bp, Probe sequence
gtaattttatctgtttctaaatcca

SEQ ID NO: 270794 - DNA, 25 bp, Probe sequence
tgtttctaaatccaaagcaggacaa

SEQ ID NO: 270795 - DNA, 25 bp, Probe sequence
tccaaagcaggacaaataataagag

SEQ ID NO: 270796 - DNA, 25 bp, Probe sequence
tctgtttctaaatccaaagcaggac

SEQ ID NO: 270797 - DNA, 25 bp, Probe sequence
tctaaatccaaagcaggacaaataa

SEQ ID NO: 270798 - DNA, 25 bp, Probe sequence
taattttatctgtttctaaatccaa

SEQ ID NO: 270799 - DNA, 25 bp, Probe sequence
taaatccaaagcaggacaaataata

SEQ ID NO: 270800 - DNA, 25 bp, Probe sequence
tatctgtttctaaatccaaagcagg

SEQ ID NO: 270801 - DNA, 25 bp, Probe sequence
tttctaaatccaaagcaggacaaat

SEQ ID NO: 270802 - DNA, 25 bp, Probe sequence
tttatctgtttctaaatccaaagca

SEQ ID NO: 270803 - DNA, 25 bp, Probe sequence
ttttatctgtttctaaatccaaagc

SEQ ID NO: 270804 - DNA, 25 bp, Probe sequence
ttatctgtttctaaatccaaagcag

SEQ ID NO: 270805 - DNA, 25 bp, Probe sequence
ttctaaatccaaagcaggacaaata

SEQ ID NO: 270806 - DNA, 25 bp, Probe sequence
atgtgggtgttgaggaaaaaggagg

SEQ ID NO: 270807 - DNA, 25 bp, Probe sequence
aggaggatactcaaatgcaagcatt

SEQ ID NO: 270808 - DNA, 25 bp, Probe sequence
agctattcgcaaacacggtatatac

SEQ ID NO: 270809 - DNA, 25 bp, Probe sequence
accagctattcgcaaacacggtata

SEQ ID NO: 270810 - DNA, 25 bp, Probe sequence
acgaatcaggattatacagtctaat

SEQ ID NO: 270811 - DNA, 25 bp, Probe sequence
acggtatatacgcaacagacaatgt

SEQ ID NO: 270812 - DNA, 25 bp, Probe sequence
aaagatattgctgagattttaggat

SEQ ID NO: 270813 - DNA, 25 bp, Probe sequence
aacacggtatatacgcaacagacaa

SEQ ID NO: 270814 - DNA, 25 bp, Probe sequence
aatcttcgatgcttctaaacaaagc

SEQ ID NO: 270815 - DNA, 25 bp, Probe sequence
caccaatttagtgcatcaggtcaaa

SEQ ID NO: 270816 - DNA, 25 bp, Probe sequence
cagtctaatcttcgatgcttctaaa

SEQ ID NO: 270817 - DNA, 25 bp, Probe sequence
ctaatcttcgatgcttctaaacaaa

SEQ ID NO: 270818 - DNA, 25 bp, Probe sequence
ctgacgcaccaatttagtgcatcag

SEQ ID NO: 270819 - DNA, 25 bp, Probe sequence
ccaatttagtgcatcaggtcaaaac

SEQ ID NO: 270820 - DNA, 25 bp, Probe sequence
gcaaacacggtatatacgcaacaga

SEQ ID NO: 270821 - DNA, 25 bp, Probe sequence
gcaagatcagacaatgccattagaa

SEQ ID NO: 270822 - DNA, 25 bp, Probe sequence
gaaatatgatcattatcaacgaatc

SEQ ID NO: 270823 - DNA, 25 bp, Probe sequence
gaaatcatgttgatagcgaggacaa

SEQ ID NO: 270824 - DNA, 25 bp, Probe sequence
gacaatgccattagaaatcatgttg

SEQ ID NO: 270825 - DNA, 25 bp, Probe sequence
gacgcaccaatttagtgcatcaggt

SEQ ID NO: 270826 - DNA, 25 bp, Probe sequence
gaggatactcaaatgcaagcattac

SEQ ID NO: 270827 - DNA, 25 bp, Probe sequence
gatcattatcaacgaatcaggatta

SEQ ID NO: 270828 - DNA, 25 bp, Probe sequence
gtctaatcttcgatgcttctaaaca

SEQ ID NO: 270829 - DNA, 25 bp, Probe sequence
gtgcatcaggtcaaaacagaaatat

SEQ ID NO: 270830 - DNA, 25 bp, Probe sequence
ggatatgcaagatcagacaatgcca

SEQ ID NO: 270831 - DNA, 25 bp, Probe sequence
taaagagctaccagtaagaacagta

SEQ ID NO: 270832 - DNA, 25 bp, Probe sequence
tacagtctaatcttcgatgcttcta

SEQ ID NO: 270833 - DNA, 25 bp, Probe sequence
tatacgcaacagacaatgtaattga

SEQ ID NO: 270834 - DNA, 25 bp, Probe sequence
tatacagtctaatcttcgatgcttc

SEQ ID NO: 270835 - DNA, 25 bp, Probe sequence
tattcgcaaacacggtatatacgca

SEQ ID NO: 270836 - DNA, 25 bp, Probe sequence
tattgctgagattttaggatatgca

SEQ ID NO: 270837 - DNA, 25 bp, Probe sequence
tttagtgcatcaggtcaaaacagaa

SEQ ID NO: 270838 - DNA, 25 bp, Probe sequence
ttaattttaaagagctaccagtaag

SEQ ID NO: 270839 - DNA, 25 bp, Probe sequence
ttcgcaaacacggtatatacgcaac

SEQ ID NO: 270840 - DNA, 25 bp, Probe sequence
aacgattcaaacgctgggtaacatc

SEQ ID NO: 270841 - DNA, 25 bp, Probe sequence
attcgcaaatatggtatctacgcaa

SEQ ID NO: 270842 - DNA, 25 bp, Probe sequence
atcgaggacttactgcagtcaacga

SEQ ID NO: 270843 - DNA, 25 bp, Probe sequence
atgttgctgacattttaggatatgc

SEQ ID NO: 270844 - DNA, 25 bp, Probe sequence
agaacattagaggttgacggagaac

SEQ ID NO: 270845 - DNA, 25 bp, Probe sequence
acgcaacggacaacgtaattgaaca

SEQ ID NO: 270846 - DNA, 25 bp, Probe sequence
actgcagtcaacgaatcgggtttat

SEQ ID NO: 270847 - DNA, 25 bp, Probe sequence
acttactgcagtcaacgaatcgggt

SEQ ID NO: 270848 - DNA, 25 bp, Probe sequence
acagcctaatcttctcatcaaaact

SEQ ID NO: 270849 - DNA, 25 bp, Probe sequence
acacagattcagacactataacaat

SEQ ID NO: 270850 - DNA, 25 bp, Probe sequence
acaattgtgcgttctgatggcagag

SEQ ID NO: 270851 - DNA, 25 bp, Probe sequence
aaacccaaagcagattatgttgatg

SEQ ID NO: 270852 - DNA, 25 bp, Probe sequence
aacttacttttgcaacaagaaatcg

SEQ ID NO: 270853 - DNA, 25 bp, Probe sequence
aacatgttgatgaagacgacaagaa

SEQ ID NO: 270854 - DNA, 25 bp, Probe sequence
ctaacgtcgcgaaatacgactttag

SEQ ID NO: 270855 - DNA, 25 bp, Probe sequence
gcctaatcttctcatcaaaactaga

SEQ ID NO: 270856 - DNA, 25 bp, Probe sequence
gctaaacgattcaaacgctgggtaa

SEQ ID NO: 270857 - DNA, 25 bp, Probe sequence
gcaaacggacgagatgctttgtcaa

SEQ ID NO: 270858 - DNA, 25 bp, Probe sequence
gaatcgggtttatacagcctaatct

SEQ ID NO: 270859 - DNA, 25 bp, Probe sequence
gaattaccagtaagaacattagagg

SEQ ID NO: 270860 - DNA, 25 bp, Probe sequence
gaaagttctaacgtcgcgaaatacg

SEQ ID NO: 270861 - DNA, 25 bp, Probe sequence
gaaatcggagagctaaaacccaaag

SEQ ID NO: 270862 - DNA, 25 bp, Probe sequence
gacaagaaagttctaacgtcgcgaa

SEQ ID NO: 270863 - DNA, 25 bp, Probe sequence
gacactataacaattgtgcgttctg

SEQ ID NO: 270864 - DNA, 25 bp, Probe sequence
gacggagaaccatattttataggaa

SEQ ID NO: 270865 - DNA, 25 bp, Probe sequence
gagatgctttgtcaaaacatgttga

SEQ ID NO: 270866 - DNA, 25 bp, Probe sequence
gtgcgttctgatggcagagaagaca

SEQ ID NO: 270867 - DNA, 25 bp, Probe sequence
gggtttatacagcctaatcttctca

SEQ ID NO: 270868 - DNA, 25 bp, Probe sequence
tcaaaactagaatcagctaaacgat

SEQ ID NO: 270869 - DNA, 25 bp, Probe sequence
tcctaccagccattcgcaaatatgg

SEQ ID NO: 270870 - DNA, 25 bp, Probe sequence
tatggtatctacgcaacggacaacg

SEQ ID NO: 270871 - DNA, 25 bp, Probe sequence
tatacagcctaatcttctcatcaaa

SEQ ID NO: 270872 - DNA, 25 bp, Probe sequence
ttaggatatgcaaacggacgagatg

SEQ ID NO: 270873 - DNA, 25 bp, Probe sequence
ttaccaaatcgaggacttactgcag

SEQ ID NO: 270874 - DNA, 25 bp, Probe sequence
atcataacctttcaggacaaattga

SEQ ID NO: 270875 - DNA, 25 bp, Probe sequence
atatcataacctttcaggacaaatt

SEQ ID NO: 270876 - DNA, 25 bp, Probe sequence
atacactcgagatcttttcaacaaa

SEQ ID NO: 270877 - DNA, 25 bp, Probe sequence
atcttttcaacaaacatctaagcat

SEQ ID NO: 270878 - DNA, 25 bp, Probe sequence
aggacaaattgaagcttatgataaa

SEQ ID NO: 270879 - DNA, 25 bp, Probe sequence
agatacactcgagatcttttcaaca

SEQ ID NO: 270880 - DNA, 25 bp, Probe sequence
actcgagatcttttcaacaaacatc

SEQ ID NO: 270881 - DNA, 25 bp, Probe sequence
actacaactaaaatatcataacctt

SEQ ID NO: 270882 - DNA, 25 bp, Probe sequence
acatctaagcatgaataacgaagac

SEQ ID NO: 270883 - DNA, 25 bp, Probe sequence
acactcgagatcttttcaacaaaca

SEQ ID NO: 270884 - DNA, 25 bp, Probe sequence
acaactaaaatatcataacctttca

SEQ ID NO: 270885 - DNA, 25 bp, Probe sequence
aaaatatcataacctttcaggacaa

SEQ ID NO: 270886 - DNA, 25 bp, Probe sequence
aacaaacatctaagcatgaataacg

SEQ ID NO: 270887 - DNA, 25 bp, Probe sequence
aactaaaatatcataacctttcagg

SEQ ID NO: 270888 - DNA, 25 bp, Probe sequence
aacctttcaggacaaattgaagctt

SEQ ID NO: 270889 - DNA, 25 bp, Probe sequence
aagatacactcgagatcttttcaac

SEQ ID NO: 270890 - DNA, 25 bp, Probe sequence
aataagatacactcgagatcttttc

SEQ ID NO: 270891 - DNA, 25 bp, Probe sequence
aatatcataacctttcaggacaaat

SEQ ID NO: 270892 - DNA, 25 bp, Probe sequence
cactcgagatcttttcaacaaacat

SEQ ID NO: 270893 - DNA, 25 bp, Probe sequence
caggacaaattgaagcttatgataa

SEQ ID NO: 270894 - DNA, 25 bp, Probe sequence
cataacctttcaggacaaattgaag

SEQ ID NO: 270895 - DNA, 25 bp, Probe sequence
cttttcaacaaacatctaagcatga

SEQ ID NO: 270896 - DNA, 25 bp, Probe sequence
ctaaaatatcataacctttcaggac

SEQ ID NO: 270897 - DNA, 25 bp, Probe sequence
ctcgagatcttttcaacaaacatct

SEQ ID NO: 270898 - DNA, 25 bp, Probe sequence
gcaagaccaatcattaaaattagta

SEQ ID NO: 270899 - DNA, 25 bp, Probe sequence
gaagcttatgataaatcacttaaag

SEQ ID NO: 270900 - DNA, 25 bp, Probe sequence
gagatcttttcaacaaacatctaag

SEQ ID NO: 270901 - DNA, 25 bp, Probe sequence
gatcttttcaacaaacatctaagca

SEQ ID NO: 270902 - DNA, 25 bp, Probe sequence
gatacactcgagatcttttcaacaa

SEQ ID NO: 270903 - DNA, 25 bp, Probe sequence
gtaaaactacaactaaaatatcata

SEQ ID NO: 270904 - DNA, 25 bp, Probe sequence
tcgagatcttttcaacaaacatcta

SEQ ID NO: 270905 - DNA, 25 bp, Probe sequence
taagatacactcgagatcttttcaa

SEQ ID NO: 270906 - DNA, 25 bp, Probe sequence
taaaatatcataacctttcaggaca

SEQ ID NO: 270907 - DNA, 25 bp, Probe sequence
tacactcgagatcttttcaacaaac

SEQ ID NO: 270908 - DNA, 25 bp, Probe sequence
attaggaaagcatcaatttaagaat

SEQ ID NO: 270909 - DNA, 25 bp, Probe sequence
attatcgctgatttttttgacgaaa

SEQ ID NO: 270910 - DNA, 25 bp, Probe sequence
atttagcaaacctcttgaatatatc

SEQ ID NO: 270911 - DNA, 25 bp, Probe sequence
atatcaactgaaggttatcgtttaa

SEQ ID NO: 270912 - DNA, 25 bp, Probe sequence
atcgctgatttttttgacgaaaata

SEQ ID NO: 270913 - DNA, 25 bp, Probe sequence
atgagatgtttattatcgctgattt

SEQ ID NO: 270914 - DNA, 25 bp, Probe sequence
atgatgagatgtttattatcgctga

SEQ ID NO: 270915 - DNA, 25 bp, Probe sequence
atgtttattatcgctgatttttttg

SEQ ID NO: 270916 - DNA, 25 bp, Probe sequence
agatttagcaaacctcttgaatata

SEQ ID NO: 270917 - DNA, 25 bp, Probe sequence
agatgtttattatcgctgatttttt

SEQ ID NO: 270918 - DNA, 25 bp, Probe sequence
acctcttgaatatatcaactgaagg

SEQ ID NO: 270919 - DNA, 25 bp, Probe sequence
actcaagaagatttagcaaacctct

SEQ ID NO: 270920 - DNA, 25 bp, Probe sequence
aaacctcttgaatatatcaactgaa

SEQ ID NO: 270921 - DNA, 25 bp, Probe sequence
aagaagatttagcaaacctcttgaa

SEQ ID NO: 270922 - DNA, 25 bp, Probe sequence
gcaaacctcttgaatatatcaactg

SEQ ID NO: 270923 - DNA, 25 bp, Probe sequence
gaatatatcaactgaaggttatcgt

SEQ ID NO: 270924 - DNA, 25 bp, Probe sequence
gaatgatgagatgtttattatcgct

SEQ ID NO: 270925 - DNA, 25 bp, Probe sequence
gaagatttagcaaacctcttgaata

SEQ ID NO: 270926 - DNA, 25 bp, Probe sequence
gaaagtgtactcaagaagatttagc

SEQ ID NO: 270927 - DNA, 25 bp, Probe sequence
gagatgtttattatcgctgattttt

SEQ ID NO: 270928 - DNA, 25 bp, Probe sequence
gatgtttattatcgctgattttttt

SEQ ID NO: 270929 - DNA, 25 bp, Probe sequence
gatgagatgtttattatcgctgatt

SEQ ID NO: 270930 - DNA, 25 bp, Probe sequence
gatttagcaaacctcttgaatatat

SEQ ID NO: 270931 - DNA, 25 bp, Probe sequence
gtttattatcgctgatttttttgac

SEQ ID NO: 270932 - DNA, 25 bp, Probe sequence
gtactcaagaagatttagcaaacct

SEQ ID NO: 270933 - DNA, 25 bp, Probe sequence
gtgtactcaagaagatttagcaaac

SEQ ID NO: 270934 - DNA, 25 bp, Probe sequence
tggagatatttttttacccacaaag

SEQ ID NO: 270935 - DNA, 25 bp, Probe sequence
ttacccacaaagtacacgaaacgca

SEQ ID NO: 270936 - DNA, 25 bp, Probe sequence
tcaactgaaggttatcgtttaaaag

SEQ ID NO: 270937 - DNA, 25 bp, Probe sequence
tacccacaaagtacacgaaacgcaa

SEQ ID NO: 270938 - DNA, 25 bp, Probe sequence
tattggagatatttttttacccaca

SEQ ID NO: 270939 - DNA, 25 bp, Probe sequence
ttattatcgctgatttttttgacga

SEQ ID NO: 270940 - DNA, 25 bp, Probe sequence
ttatcgctgatttttttgacgaaaa

SEQ ID NO: 270941 - DNA, 25 bp, Probe sequence
ttagcaaacctcttgaatatatcaa

SEQ ID NO: 270942 - DNA, 25 bp, Probe sequence
atagagctagggagtttaacggtat

SEQ ID NO: 270943 - DNA, 25 bp, Probe sequence
ataactaacaaaccaactgataaca

SEQ ID NO: 270944 - DNA, 25 bp, Probe sequence
atcaatatggattatcacaaagcaa

SEQ ID NO: 270945 - DNA, 25 bp, Probe sequence
atcacaaagcaatcaagaaaacagt

SEQ ID NO: 270946 - DNA, 25 bp, Probe sequence
agggatatgccaatttatataacta

SEQ ID NO: 270947 - DNA, 25 bp, Probe sequence
agagctagggagtttaacggtatgg

SEQ ID NO: 270948 - DNA, 25 bp, Probe sequence
agcgagtatcaatatggattatcac

SEQ ID NO: 270949 - DNA, 25 bp, Probe sequence
acggtatggaagaagcgagtatcaa

SEQ ID NO: 270950 - DNA, 25 bp, Probe sequence
aactaacaaaccaactgataacaat

SEQ ID NO: 270951 - DNA, 25 bp, Probe sequence
aacggtatggaagaagcgagtatca

SEQ ID NO: 270952 - DNA, 25 bp, Probe sequence
caaagcaatcaagaaaacagtgaca

SEQ ID NO: 270953 - DNA, 25 bp, Probe sequence
caaaccaactgataacaattcagat

SEQ ID NO: 270954 - DNA, 25 bp, Probe sequence
ctaacaaaccaactgataacaattc

SEQ ID NO: 270955 - DNA, 25 bp, Probe sequence
gctagggagtttaacggtatggaag

SEQ ID NO: 270956 - DNA, 25 bp, Probe sequence
cgtcatagggatatgccaatttata

SEQ ID NO: 270957 - DNA, 25 bp, Probe sequence
gccaatttatataactaacaaacca

SEQ ID NO: 270958 - DNA, 25 bp, Probe sequence
gcgagtatcaatatggattatcaca

SEQ ID NO: 270959 - DNA, 25 bp, Probe sequence
gaagcgagtatcaatatggattatc

SEQ ID NO: 270960 - DNA, 25 bp, Probe sequence
gaaatagagctagggagtttaacgg

SEQ ID NO: 270961 - DNA, 25 bp, Probe sequence
gagctagggagtttaacggtatgga

SEQ ID NO: 270962 - DNA, 25 bp, Probe sequence
gttactccacaaatagaaatagagc

SEQ ID NO: 270963 - DNA, 25 bp, Probe sequence
gtatcaatatggattatcacaaagc

SEQ ID NO: 270964 - DNA, 25 bp, Probe sequence
ggagtttaacggtatggaagaagcg

SEQ ID NO: 270965 - DNA, 25 bp, Probe sequence
ggtatggaagaagcgagtatcaata

SEQ ID NO: 270966 - DNA, 25 bp, Probe sequence
ggatatgccaatttatataactaac

SEQ ID NO: 270967 - DNA, 25 bp, Probe sequence
ggaagaagcgagtatcaatatggat

SEQ ID NO: 270968 - DNA, 25 bp, Probe sequence
tcatagggatatgccaatttatata

SEQ ID NO: 270969 - DNA, 25 bp, Probe sequence
taacaaaccaactgataacaattca

SEQ ID NO: 270970 - DNA, 25 bp, Probe sequence
tagttactccacaaatagaaataga

SEQ ID NO: 270971 - DNA, 25 bp, Probe sequence
tatggattatcacaaagcaatcaag

SEQ ID NO: 270972 - DNA, 25 bp, Probe sequence
tatgccaatttatataactaacaaa

SEQ ID NO: 270973 - DNA, 25 bp, Probe sequence
ttatataactaacaaaccaactgat

SEQ ID NO: 270974 - DNA, 25 bp, Probe sequence
ttagttactccacaaatagaaatag

SEQ ID NO: 270975 - DNA, 25 bp, Probe sequence
ttaacggtatggaagaagcgagtat

SEQ ID NO: 270976 - DNA, 25 bp, Probe sequence
attctgctcaaattattgataaaac

SEQ ID NO: 270977 - DNA, 25 bp, Probe sequence
atcaccaaagtacattctgctcaaa

SEQ ID NO: 270978 - DNA, 25 bp, Probe sequence
atgaatgcattagtagatttaaata

SEQ ID NO: 270979 - DNA, 25 bp, Probe sequence
agtacattctgctcaaattattgat

SEQ ID NO: 270980 - DNA, 25 bp, Probe sequence
agtatgaatgcattagtagatttaa

SEQ ID NO: 270981 - DNA, 25 bp, Probe sequence
agttgcacgtgatagtatgaatgca

SEQ ID NO: 270982 - DNA, 25 bp, Probe sequence
agcaagttgcacgtgatagtatgaa

SEQ ID NO: 270983 - DNA, 25 bp, Probe sequence
accgagcaagttgcacgtgatagta

SEQ ID NO: 270984 - DNA, 25 bp, Probe sequence
accaaagtacattctgctcaaatta

SEQ ID NO: 270985 - DNA, 25 bp, Probe sequence
acgtgatagtatgaatgcattagta

SEQ ID NO: 270986 - DNA, 25 bp, Probe sequence
acattctgctcaaattattgataaa

SEQ ID NO: 270987 - DNA, 25 bp, Probe sequence
aaagtacattctgctcaaattattg

SEQ ID NO: 270988 - DNA, 25 bp, Probe sequence
aagttgcacgtgatagtatgaatgc

SEQ ID NO: 270989 - DNA, 25 bp, Probe sequence
aagtacattctgctcaaattattga

SEQ ID NO: 270990 - DNA, 25 bp, Probe sequence
caagttgcacgtgatagtatgaatg

SEQ ID NO: 270991 - DNA, 25 bp, Probe sequence
caaagtacattctgctcaaattatt

SEQ ID NO: 270992 - DNA, 25 bp, Probe sequence
cacgtgatagtatgaatgcattagt

SEQ ID NO: 270993 - DNA, 25 bp, Probe sequence
caccaaagtacattctgctcaaatt

SEQ ID NO: 270994 - DNA, 25 bp, Probe sequence
cattctgctcaaattattgataaaa

SEQ ID NO: 270995 - DNA, 25 bp, Probe sequence
ctatcaccaaagtacattctgctca

SEQ ID NO: 270996 - DNA, 25 bp, Probe sequence
cgagcaagttgcacgtgatagtatg

SEQ ID NO: 270997 - DNA, 25 bp, Probe sequence
ccgagcaagttgcacgtgatagtat

SEQ ID NO: 270998 - DNA, 25 bp, Probe sequence
ccaaagtacattctgctcaaattat

SEQ ID NO: 270999 - DNA, 25 bp, Probe sequence
gcacgtgatagtatgaatgcattag

SEQ ID NO: 271000 - DNA, 25 bp, Probe sequence
gcaagttgcacgtgatagtatgaat

SEQ ID NO: 271001 - DNA, 25 bp, Probe sequence
gagcaagttgcacgtgatagtatga

SEQ ID NO: 271002 - DNA, 25 bp, Probe sequence
gatagtatgaatgcattagtagatt

SEQ ID NO: 271003 - DNA, 25 bp, Probe sequence
gttgcacgtgatagtatgaatgcat

SEQ ID NO: 271004 - DNA, 25 bp, Probe sequence
gtatgaatgcattagtagatttaaa

SEQ ID NO: 271005 - DNA, 25 bp, Probe sequence
gtacattctgctcaaattattgata

SEQ ID NO: 271006 - DNA, 25 bp, Probe sequence
tcaccaaagtacattctgctcaaat

SEQ ID NO: 271007 - DNA, 25 bp, Probe sequence
tacattctgctcaaattattgataa

SEQ ID NO: 271008 - DNA, 25 bp, Probe sequence
tatcaccaaagtacattctgctcaa

SEQ ID NO: 271009 - DNA, 25 bp, Probe sequence
ttgcacgtgatagtatgaatgcatt

SEQ ID NO: 271010 - DNA, 25 bp, Probe sequence
attcgctaacattaaccctgatgca

SEQ ID NO: 271011 - DNA, 25 bp, Probe sequence
attatcatttactaaagtagacgct

SEQ ID NO: 271012 - DNA, 25 bp, Probe sequence
atttaagcgtcgattcgctaacatt

SEQ ID NO: 271013 - DNA, 25 bp, Probe sequence
atgagtaaaataaaccacatcacta

SEQ ID NO: 271014 - DNA, 25 bp, Probe sequence
agcgtcgattcgctaacattaaccc

SEQ ID NO: 271015 - DNA, 25 bp, Probe sequence
agtagacgctaacggcaaacaaaca

SEQ ID NO: 271016 - DNA, 25 bp, Probe sequence
accacatcactattgtattatcatt

SEQ ID NO: 271017 - DNA, 25 bp, Probe sequence
acagaatttaagcgtcgattcgcta

SEQ ID NO: 271018 - DNA, 25 bp, Probe sequence
aaataaaccacatcactattgtatt

SEQ ID NO: 271019 - DNA, 25 bp, Probe sequence
aaaccacatcactattgtattatca

SEQ ID NO: 271020 - DNA, 25 bp, Probe sequence
aacattaaccctgatgcatcaaacg

SEQ ID NO: 271021 - DNA, 25 bp, Probe sequence
aaccacatcactattgtattatcat

SEQ ID NO: 271022 - DNA, 25 bp, Probe sequence
aagcgtcgattcgctaacattaacc

SEQ ID NO: 271023 - DNA, 25 bp, Probe sequence
ctaacattaaccctgatgcatcaaa

SEQ ID NO: 271024 - DNA, 25 bp, Probe sequence
cgctaacggcaaacaaacagaattt

SEQ ID NO: 271025 - DNA, 25 bp, Probe sequence
cgattcgctaacattaaccctgatg

SEQ ID NO: 271026 - DNA, 25 bp, Probe sequence
cgctaacattaaccctgatgcatca

SEQ ID NO: 271027 - DNA, 25 bp, Probe sequence
ccacatcactattgtattatcattt

SEQ ID NO: 271028 - DNA, 25 bp, Probe sequence
gctaacattaaccctgatgcatcaa

SEQ ID NO: 271029 - DNA, 25 bp, Probe sequence
gaatttaagcgtcgattcgctaaca

SEQ ID NO: 271030 - DNA, 25 bp, Probe sequence
gacgctaacggcaaacaaacagaat

SEQ ID NO: 271031 - DNA, 25 bp, Probe sequence
gattcgctaacattaaccctgatgc

SEQ ID NO: 271032 - DNA, 25 bp, Probe sequence
gtagacgctaacggcaaacaaacag

SEQ ID NO: 271033 - DNA, 25 bp, Probe sequence
gtcgattcgctaacattaaccctga

SEQ ID NO: 271034 - DNA, 25 bp, Probe sequence
tttactaaagtagacgctaacggca

SEQ ID NO: 271035 - DNA, 25 bp, Probe sequence
tcgctaacattaaccctgatgcatc

SEQ ID NO: 271036 - DNA, 25 bp, Probe sequence
tcgattcgctaacattaaccctgat

SEQ ID NO: 271037 - DNA, 25 bp, Probe sequence
tactaaagtagacgctaacggcaaa

SEQ ID NO: 271038 - DNA, 25 bp, Probe sequence
taacattaaccctgatgcatcaaac

SEQ ID NO: 271039 - DNA, 25 bp, Probe sequence
taaagtagacgctaacggcaaacaa

SEQ ID NO: 271040 - DNA, 25 bp, Probe sequence
taaaccacatcactattgtattatc

SEQ ID NO: 271041 - DNA, 25 bp, Probe sequence
tagacgctaacggcaaacaaacaga

SEQ ID NO: 271042 - DNA, 25 bp, Probe sequence
ttaagcgtcgattcgctaacattaa

SEQ ID NO: 271043 - DNA, 25 bp, Probe sequence
ttcgctaacattaaccctgatgcat

SEQ ID NO: 271044 - DNA, 25 bp, Probe sequence
attcgccaatattaatcctgaagta

SEQ ID NO: 271045 - DNA, 25 bp, Probe sequence
atttaaacgtcgattcgccaatatt

SEQ ID NO: 271046 - DNA, 25 bp, Probe sequence
atttagcaaacttatcgagcgactt

SEQ ID NO: 271047 - DNA, 25 bp, Probe sequence
atcacattacaattgtattatcatt

SEQ ID NO: 271048 - DNA, 25 bp, Probe sequence
atcctgaagtatcaaacgaccaaat

SEQ ID NO: 271049 - DNA, 25 bp, Probe sequence
agtcatcaaatctgtatcaatttaa

SEQ ID NO: 271050 - DNA, 25 bp, Probe sequence
agaatttaaacgtcgattcgccaat

SEQ ID NO: 271051 - DNA, 25 bp, Probe sequence
acgtcgattcgccaatattaatcct

SEQ ID NO: 271052 - DNA, 25 bp, Probe sequence
actggagaaacatacaataacatcg

SEQ ID NO: 271053 - DNA, 25 bp, Probe sequence
acagaatttaaacgtcgattcgcca

SEQ ID NO: 271054 - DNA, 25 bp, Probe sequence
aaacgtcgattcgccaatattaatc

SEQ ID NO: 271055 - DNA, 25 bp, Probe sequence
aaaacatttagcaaacttatcgagc

SEQ ID NO: 271056 - DNA, 25 bp, Probe sequence
aacaaatcacattacaattgtatta

SEQ ID NO: 271057 - DNA, 25 bp, Probe sequence
aacatcgaagtcatcaaatctgtat

SEQ ID NO: 271058 - DNA, 25 bp, Probe sequence
aacatttagcaaacttatcgagcga

SEQ ID NO: 271059 - DNA, 25 bp, Probe sequence
aatcctgaagtatcaaacgaccaaa

SEQ ID NO: 271060 - DNA, 25 bp, Probe sequence
aataacatcgaagtcatcaaatctg

SEQ ID NO: 271061 - DNA, 25 bp, Probe sequence
catcgaagtcatcaaatctgtatca

SEQ ID NO: 271062 - DNA, 25 bp, Probe sequence
catacaataacatcgaagtcatcaa

SEQ ID NO: 271063 - DNA, 25 bp, Probe sequence
cgtcgattcgccaatattaatcctg

SEQ ID NO: 271064 - DNA, 25 bp, Probe sequence
gccaatattaatcctgaagtatcaa

SEQ ID NO: 271065 - DNA, 25 bp, Probe sequence
gaatttaaacgtcgattcgccaata

SEQ ID NO: 271066 - DNA, 25 bp, Probe sequence
gaagtcatcaaatctgtatcaattt

SEQ ID NO: 271067 - DNA, 25 bp, Probe sequence
gaaacatacaataacatcgaagtca

SEQ ID NO: 271068 - DNA, 25 bp, Probe sequence
gattcgccaatattaatcctgaagt

SEQ ID NO: 271069 - DNA, 25 bp, Probe sequence
gtattatcatttacaaaactagata

SEQ ID NO: 271070 - DNA, 25 bp, Probe sequence
gtcgattcgccaatattaatcctga

SEQ ID NO: 271071 - DNA, 25 bp, Probe sequence
tcgccaatattaatcctgaagtatc

SEQ ID NO: 271072 - DNA, 25 bp, Probe sequence
tcgattcgccaatattaatcctgaa

SEQ ID NO: 271073 - DNA, 25 bp, Probe sequence
tcgaagtcatcaaatctgtatcaat

SEQ ID NO: 271074 - DNA, 25 bp, Probe sequence
tttagcaaacttatcgagcgactta

SEQ ID NO: 271075 - DNA, 25 bp, Probe sequence
ttagcaaacttatcgagcgacttac

SEQ ID NO: 271076 - DNA, 25 bp, Probe sequence
ttaatcctgaagtatcaaacgacca

SEQ ID NO: 271077 - DNA, 25 bp, Probe sequence
ttaaacgtcgattcgccaatattaa

SEQ ID NO: 271078 - DNA, 25 bp, Probe sequence
attgcggagacgttaaatttgttat

SEQ ID NO: 271079 - DNA, 25 bp, Probe sequence
atatcaagatttcacaggaagtttt

SEQ ID NO: 271080 - DNA, 25 bp, Probe sequence
atggttaaccatgctcaagatttta

SEQ ID NO: 271081 - DNA, 25 bp, Probe sequence
agatttcacaggaagttttacaact

SEQ ID NO: 271082 - DNA, 25 bp, Probe sequence
acgtgtagtatatcaagatttcaca

SEQ ID NO: 271083 - DNA, 25 bp, Probe sequence
acttctgaaatggttaaccatgctc

SEQ ID NO: 271084 - DNA, 25 bp, Probe sequence
acagaacgtgtagtatatcaagatt

SEQ ID NO: 271085 - DNA, 25 bp, Probe sequence
acaacttctgaaatggttaaccatg

SEQ ID NO: 271086 - DNA, 25 bp, Probe sequence
aatggttaaccatgctcaagatttt

SEQ ID NO: 271087 - DNA, 25 bp, Probe sequence
aatcgacaaagaaggtacagaacgt

SEQ ID NO: 271088 - DNA, 25 bp, Probe sequence
cgctaagaaaattgcggagacgtta

SEQ ID NO: 271089 - DNA, 25 bp, Probe sequence
gcggagacgttaaatttgttatatc

SEQ ID NO: 271090 - DNA, 25 bp, Probe sequence
gctaagaaaattgcggagacgttaa

SEQ ID NO: 271091 - DNA, 25 bp, Probe sequence
gaaggtacagaacgtgtagtatatc

SEQ ID NO: 271092 - DNA, 25 bp, Probe sequence
gaacgtgtagtatatcaagatttca

SEQ ID NO: 271093 - DNA, 25 bp, Probe sequence
gaaattatcaacaatacagaaaggt

SEQ ID NO: 271094 - DNA, 25 bp, Probe sequence
gacgttaaatttgttatatcaatta

SEQ ID NO: 271095 - DNA, 25 bp, Probe sequence
gatttcacaggaagttttacaactt

SEQ ID NO: 271096 - DNA, 25 bp, Probe sequence
gttaaccatgctcaagattttaaat

SEQ ID NO: 271097 - DNA, 25 bp, Probe sequence
gtatatcaagatttcacaggaagtt

SEQ ID NO: 271098 - DNA, 25 bp, Probe sequence
gtagtatatcaagatttcacaggaa

SEQ ID NO: 271099 - DNA, 25 bp, Probe sequence
gtgtagtatatcaagatttcacagg

SEQ ID NO: 271100 - DNA, 25 bp, Probe sequence
ggttaaccatgctcaagattttaaa

SEQ ID NO: 271101 - DNA, 25 bp, Probe sequence
ggagacgttaaatttgttatatcaa

SEQ ID NO: 271102 - DNA, 25 bp, Probe sequence
ggcaaaagaaattatcaacaataca

SEQ ID NO: 271103 - DNA, 25 bp, Probe sequence
tggttaaccatgctcaagattttaa

SEQ ID NO: 271104 - DNA, 25 bp, Probe sequence
tcacaggaagttttacaacttctga

SEQ ID NO: 271105 - DNA, 25 bp, Probe sequence
tctgaaatggttaaccatgctcaag

SEQ ID NO: 271106 - DNA, 25 bp, Probe sequence
tcaacaatacagaaaggtttatttt

SEQ ID NO: 271107 - DNA, 25 bp, Probe sequence
tcaagatttcacaggaagttttaca

SEQ ID NO: 271108 - DNA, 25 bp, Probe sequence
taaccatgctcaagattttaaatct

SEQ ID NO: 271109 - DNA, 25 bp, Probe sequence
tttaaatctgaagaaaacgctaaga

SEQ ID NO: 271110 - DNA, 25 bp, Probe sequence
ttacaacttctgaaatggttaacca

SEQ ID NO: 271111 - DNA, 25 bp, Probe sequence
ttgcggagacgttaaatttgttata

SEQ ID NO: 271112 - DNA, 25 bp, Probe sequence
attacaatacacaggatttaaagat

SEQ ID NO: 271113 - DNA, 25 bp, Probe sequence
atttaaagatgtgcacggtgtggag

SEQ ID NO: 271114 - DNA, 25 bp, Probe sequence
attttaatagtgggtacattttgat

SEQ ID NO: 271115 - DNA, 25 bp, Probe sequence
atagtgggtacattttgatttcaac

SEQ ID NO: 271116 - DNA, 25 bp, Probe sequence
atcgattttaatagtgggtacattt

SEQ ID NO: 271117 - DNA, 25 bp, Probe sequence
agtgggtacattttgatttcaacag

SEQ ID NO: 271118 - DNA, 25 bp, Probe sequence
actattacaatacacaggatttaaa

SEQ ID NO: 271119 - DNA, 25 bp, Probe sequence
acattttgatttcaacaggttataa

SEQ ID NO: 271120 - DNA, 25 bp, Probe sequence
acaggttataaaagtttcaatgaag

SEQ ID NO: 271121 - DNA, 25 bp, Probe sequence
aaatcgattttaatagtgggtacat

SEQ ID NO: 271122 - DNA, 25 bp, Probe sequence
aaaactattacaatacacaggattt

SEQ ID NO: 271123 - DNA, 25 bp, Probe sequence
aactattacaatacacaggatttaa

SEQ ID NO: 271124 - DNA, 25 bp, Probe sequence
aatcgattttaatagtgggtacatt

SEQ ID NO: 271125 - DNA, 25 bp, Probe sequence
aatagtgggtacattttgatttcaa

SEQ ID NO: 271126 - DNA, 25 bp, Probe sequence
ctattacaatacacaggatttaaag

SEQ ID NO: 271127 - DNA, 25 bp, Probe sequence
cgattttaatagtgggtacattttg

SEQ ID NO: 271128 - DNA, 25 bp, Probe sequence
gaaatcgattttaatagtgggtaca

SEQ ID NO: 271129 - DNA, 25 bp, Probe sequence
gacgaaatcgattttaatagtgggt

SEQ ID NO: 271130 - DNA, 25 bp, Probe sequence
gatttaaagatgtgcacggtgtgga

SEQ ID NO: 271131 - DNA, 25 bp, Probe sequence
gattttaatagtgggtacattttga

SEQ ID NO: 271132 - DNA, 25 bp, Probe sequence
gtacattttgatttcaacaggttat

SEQ ID NO: 271133 - DNA, 25 bp, Probe sequence
gtaaaactattacaatacacaggat

SEQ ID NO: 271134 - DNA, 25 bp, Probe sequence
gtgggtacattttgatttcaacagg

SEQ ID NO: 271135 - DNA, 25 bp, Probe sequence
gggtacattttgatttcaacaggtt

SEQ ID NO: 271136 - DNA, 25 bp, Probe sequence
ggtacattttgatttcaacaggtta

SEQ ID NO: 271137 - DNA, 25 bp, Probe sequence
tgggtacattttgatttcaacaggt

SEQ ID NO: 271138 - DNA, 25 bp, Probe sequence
tcgattttaatagtgggtacatttt

SEQ ID NO: 271139 - DNA, 25 bp, Probe sequence
taatagtgggtacattttgatttca

SEQ ID NO: 271140 - DNA, 25 bp, Probe sequence
tacattttgatttcaacaggttata

SEQ ID NO: 271141 - DNA, 25 bp, Probe sequence
tagtgggtacattttgatttcaaca

SEQ ID NO: 271142 - DNA, 25 bp, Probe sequence
ttttgatttcaacaggttataaaag

SEQ ID NO: 271143 - DNA, 25 bp, Probe sequence
ttattgacgaaatcgattttaatag

SEQ ID NO: 271144 - DNA, 25 bp, Probe sequence
ttaatagtgggtacattttgatttc

SEQ ID NO: 271145 - DNA, 25 bp, Probe sequence
ttcaacaggttataaaagtttcaat

SEQ ID NO: 271146 - DNA, 25 bp, Probe sequence
atttcgatgatgtggatgatgaaaa

SEQ ID NO: 271147 - DNA, 25 bp, Probe sequence
atatcatcatttcgatgatgtggat

SEQ ID NO: 271148 - DNA, 25 bp, Probe sequence
atcatcatttcgatgatgtggatga

SEQ ID NO: 271149 - DNA, 25 bp, Probe sequence
atcatttcgatgatgtggatgatga

SEQ ID NO: 271150 - DNA, 25 bp, Probe sequence
agttgaatatcatcatttcgatgat

SEQ ID NO: 271151 - DNA, 25 bp, Probe sequence
agaagttgaatatcatcatttcgat

SEQ ID NO: 271152 - DNA, 25 bp, Probe sequence
aagttgaatatcatcatttcgatga

SEQ ID NO: 271153 - DNA, 25 bp, Probe sequence
aatatcatcatttcgatgatgtgga

SEQ ID NO: 271154 - DNA, 25 bp, Probe sequence
catcatttcgatgatgtggatgatg

SEQ ID NO: 271155 - DNA, 25 bp, Probe sequence
catttcgatgatgtggatgatgaaa

SEQ ID NO: 271156 - DNA, 25 bp, Probe sequence
gaatatcatcatttcgatgatgtgg

SEQ ID NO: 271157 - DNA, 25 bp, Probe sequence
gaagttgaatatcatcatttcgatg

SEQ ID NO: 271158 - DNA, 25 bp, Probe sequence
gttgaatatcatcatttcgatgatg

SEQ ID NO: 271159 - DNA, 25 bp, Probe sequence
tgaatatcatcatttcgatgatgtg

SEQ ID NO: 271160 - DNA, 25 bp, Probe sequence
tcatttcgatgatgtggatgatgaa

SEQ ID NO: 271161 - DNA, 25 bp, Probe sequence
tcatcatttcgatgatgtggatgat

SEQ ID NO: 271162 - DNA, 25 bp, Probe sequence
tatcatcatttcgatgatgtggatg

SEQ ID NO: 271163 - DNA, 25 bp, Probe sequence
tttcgatgatgtggatgatgaaaaa

SEQ ID NO: 271164 - DNA, 25 bp, Probe sequence
ttcgatgatgtggatgatgaaaaag

SEQ ID NO: 271165 - DNA, 25 bp, Probe sequence
ttgaatatcatcatttcgatgatgt

SEQ ID NO: 271166 - DNA, 25 bp, Probe sequence
atatgaacgacacaaatgatttagg

SEQ ID NO: 271167 - DNA, 25 bp, Probe sequence
atacatcgtattgatcttagcatta

SEQ ID NO: 271168 - DNA, 25 bp, Probe sequence
ataacaagatacatcgtattgatct

SEQ ID NO: 271169 - DNA, 25 bp, Probe sequence
atgacacctacgaatatgaacgaca

SEQ ID NO: 271170 - DNA, 25 bp, Probe sequence
agtaatgacacctacgaatatgaac

SEQ ID NO: 271171 - DNA, 25 bp, Probe sequence
agatacatcgtattgatcttagcat

SEQ ID NO: 271172 - DNA, 25 bp, Probe sequence
agaagtaatgacacctacgaatatg

SEQ ID NO: 271173 - DNA, 25 bp, Probe sequence
acctacgaatatgaacgacacaaat

SEQ ID NO: 271174 - DNA, 25 bp, Probe sequence
acatcgtattgatcttagcattagt

SEQ ID NO: 271175 - DNA, 25 bp, Probe sequence
acacctacgaatatgaacgacacaa

SEQ ID NO: 271176 - DNA, 25 bp, Probe sequence
aaagtaataacaagatacatcgtat

SEQ ID NO: 271177 - DNA, 25 bp, Probe sequence
aaagaagtaatgacacctacgaata

SEQ ID NO: 271178 - DNA, 25 bp, Probe sequence
aacaaatggatgcaaaagtaataac

SEQ ID NO: 271179 - DNA, 25 bp, Probe sequence
aacaagatacatcgtattgatctta

SEQ ID NO: 271180 - DNA, 25 bp, Probe sequence
aagaagtaatgacacctacgaatat

SEQ ID NO: 271181 - DNA, 25 bp, Probe sequence
aagtaatgacacctacgaatatgaa

SEQ ID NO: 271182 - DNA, 25 bp, Probe sequence
aatgacacctacgaatatgaacgac

SEQ ID NO: 271183 - DNA, 25 bp, Probe sequence
caagatacatcgtattgatcttagc

SEQ ID NO: 271184 - DNA, 25 bp, Probe sequence
cacctacgaatatgaacgacacaaa

SEQ ID NO: 271185 - DNA, 25 bp, Probe sequence
ctacgaatatgaacgacacaaatga

SEQ ID NO: 271186 - DNA, 25 bp, Probe sequence
cctacgaatatgaacgacacaaatg

SEQ ID NO: 271187 - DNA, 25 bp, Probe sequence
gaatatgaacgacacaaatgattta

SEQ ID NO: 271188 - DNA, 25 bp, Probe sequence
gaagtaatgacacctacgaatatga

SEQ ID NO: 271189 - DNA, 25 bp, Probe sequence
gaacgacacaaatgatttagggtag

SEQ ID NO: 271190 - DNA, 25 bp, Probe sequence
gacacctacgaatatgaacgacaca

SEQ ID NO: 271191 - DNA, 25 bp, Probe sequence
gatacatcgtattgatcttagcatt

SEQ ID NO: 271192 - DNA, 25 bp, Probe sequence
gtaatgacacctacgaatatgaacg

SEQ ID NO: 271193 - DNA, 25 bp, Probe sequence
tgacacctacgaatatgaacgacac

SEQ ID NO: 271194 - DNA, 25 bp, Probe sequence
tgaacgacacaaatgatttagggta

SEQ ID NO: 271195 - DNA, 25 bp, Probe sequence
taatgacacctacgaatatgaacga

SEQ ID NO: 271196 - DNA, 25 bp, Probe sequence
tacatcgtattgatcttagcattag

SEQ ID NO: 271197 - DNA, 25 bp, Probe sequence
tacgaatatgaacgacacaaatgat

SEQ ID NO: 271198 - DNA, 25 bp, Probe sequence
tatgaacgacacaaatgatttaggg

SEQ ID NO: 271199 - DNA, 25 bp, Probe sequence
ttaaagaagtaatgacacctacgaa

SEQ ID NO: 271200 - DNA, 25 bp, Probe sequence
atagggacgattctaagtacatttg

SEQ ID NO: 271201 - DNA, 25 bp, Probe sequence
atttcgaagaactaaggcgtgacaa

SEQ ID NO: 271202 - DNA, 25 bp, Probe sequence
agggacgattctaagtacatttgtt

SEQ ID NO: 271203 - DNA, 25 bp, Probe sequence
agtacatttgttatagccttgttaa

SEQ ID NO: 271204 - DNA, 25 bp, Probe sequence
aatttcgaagaactaaggcgtgaca

SEQ ID NO: 271205 - DNA, 25 bp, Probe sequence
aagacagtctgagaacgcaagaaaa

SEQ ID NO: 271206 - DNA, 25 bp, Probe sequence
aagtacatttgttatagccttgtta

SEQ ID NO: 271207 - DNA, 25 bp, Probe sequence
aaggcgtgacaaagaagaagatgaa

SEQ ID NO: 271208 - DNA, 25 bp, Probe sequence
aatagggacgattctaagtacattt

SEQ ID NO: 271209 - DNA, 25 bp, Probe sequence
caagatgtggattctaggattaata

SEQ ID NO: 271210 - DNA, 25 bp, Probe sequence
catcaagatgtggattctaggatta

SEQ ID NO: 271211 - DNA, 25 bp, Probe sequence
ctaagtacatttgttatagccttgt

SEQ ID NO: 271212 - DNA, 25 bp, Probe sequence
gaagacagtctgagaacgcaagaaa

SEQ ID NO: 271213 - DNA, 25 bp, Probe sequence
gaagaactaaggcgtgacaaagaag

SEQ ID NO: 271214 - DNA, 25 bp, Probe sequence
gaactaaggcgtgacaaagaagaag

SEQ ID NO: 271215 - DNA, 25 bp, Probe sequence
gacaagttagatagaaatttcgaag

SEQ ID NO: 271216 - DNA, 25 bp, Probe sequence
gacagtctgagaacgcaagaaaaaa

SEQ ID NO: 271217 - DNA, 25 bp, Probe sequence
gacatcaagatgtggattctaggat

SEQ ID NO: 271218 - DNA, 25 bp, Probe sequence
gacgattctaagtacatttgttata

SEQ ID NO: 271219 - DNA, 25 bp, Probe sequence
gatgtggattctaggattaataggg

SEQ ID NO: 271220 - DNA, 25 bp, Probe sequence
gattctaagtacatttgttatagcc

SEQ ID NO: 271221 - DNA, 25 bp, Probe sequence
gtacatttgttatagccttgttaaa

SEQ ID NO: 271222 - DNA, 25 bp, Probe sequence
gggacgattctaagtacatttgtta

SEQ ID NO: 271223 - DNA, 25 bp, Probe sequence
ggattaatagggacgattctaagta

SEQ ID NO: 271224 - DNA, 25 bp, Probe sequence
ggattctaggattaatagggacgat

SEQ ID NO: 271225 - DNA, 25 bp, Probe sequence
ggacgattctaagtacatttgttat

SEQ ID NO: 271226 - DNA, 25 bp, Probe sequence
tgttatagccttgttaaaaactatt

SEQ ID NO: 271227 - DNA, 25 bp, Probe sequence
tcgaagaactaaggcgtgacaaaga

SEQ ID NO: 271228 - DNA, 25 bp, Probe sequence
tctaggattaatagggacgattcta

SEQ ID NO: 271229 - DNA, 25 bp, Probe sequence
taagtacatttgttatagccttgtt

SEQ ID NO: 271230 - DNA, 25 bp, Probe sequence
tacatttgttatagccttgttaaaa

SEQ ID NO: 271231 - DNA, 25 bp, Probe sequence
tagaagacagtctgagaacgcaaga

SEQ ID NO: 271232 - DNA, 25 bp, Probe sequence
tttcgaagaactaaggcgtgacaaa

SEQ ID NO: 271233 - DNA, 25 bp, Probe sequence
ttctaagtacatttgttatagcctt

SEQ ID NO: 271234 - DNA, 25 bp, Probe sequence
attaatttcaccaacattcgaagat

SEQ ID NO: 271235 - DNA, 25 bp, Probe sequence
atttcaccaacattcgaagatatta

SEQ ID NO: 271236 - DNA, 25 bp, Probe sequence
atagcgtggtatgtagatatggaag

SEQ ID NO: 271237 - DNA, 25 bp, Probe sequence
agtatccagaaaatctagagtcata

SEQ ID NO: 271238 - DNA, 25 bp, Probe sequence
agaagatatagcgtggtatgtagat

SEQ ID NO: 271239 - DNA, 25 bp, Probe sequence
agcgtggtatgtagatatggaagtt

SEQ ID NO: 271240 - DNA, 25 bp, Probe sequence
accaacattcgaagatattaaaaca

SEQ ID NO: 271241 - DNA, 25 bp, Probe sequence
aaattaatttcaccaacattcgaag

SEQ ID NO: 271242 - DNA, 25 bp, Probe sequence
aaagaagatatagcgtggtatgtag

SEQ ID NO: 271243 - DNA, 25 bp, Probe sequence
aaaagtatccagaaaatctagagtc

SEQ ID NO: 271244 - DNA, 25 bp, Probe sequence
aagtatccagaaaatctagagtcat

SEQ ID NO: 271245 - DNA, 25 bp, Probe sequence
aatttcaccaacattcgaagatatt

SEQ ID NO: 271246 - DNA, 25 bp, Probe sequence
aattaatttcaccaacattcgaaga

SEQ ID NO: 271247 - DNA, 25 bp, Probe sequence
caccaacattcgaagatattaaaac

SEQ ID NO: 271248 - DNA, 25 bp, Probe sequence
gcgtggtatgtagatatggaagtta

SEQ ID NO: 271249 - DNA, 25 bp, Probe sequence
gaagatatagcgtggtatgtagata

SEQ ID NO: 271250 - DNA, 25 bp, Probe sequence
gaggaatatgcaattattacaggag

SEQ ID NO: 271251 - DNA, 25 bp, Probe sequence
gatatagcgtggtatgtagatatgg

SEQ ID NO: 271252 - DNA, 25 bp, Probe sequence
gtatccagaaaatctagagtcatag

SEQ ID NO: 271253 - DNA, 25 bp, Probe sequence
gtaaagaagatatagcgtggtatgt

SEQ ID NO: 271254 - DNA, 25 bp, Probe sequence
gtggtatgtagatatggaagttata

SEQ ID NO: 271255 - DNA, 25 bp, Probe sequence
ggtatgtagatatggaagttataga

SEQ ID NO: 271256 - DNA, 25 bp, Probe sequence
ggagaaaagtatccagaaaatctag

SEQ ID NO: 271257 - DNA, 25 bp, Probe sequence
ggaatatgcaattattacaggagaa

SEQ ID NO: 271258 - DNA, 25 bp, Probe sequence
tcaccaacattcgaagatattaaaa

SEQ ID NO: 271259 - DNA, 25 bp, Probe sequence
taatttcaccaacattcgaagatat

SEQ ID NO: 271260 - DNA, 25 bp, Probe sequence
taaattaatttcaccaacattcgaa

SEQ ID NO: 271261 - DNA, 25 bp, Probe sequence
tagcgtggtatgtagatatggaagt

SEQ ID NO: 271262 - DNA, 25 bp, Probe sequence
tatgcaattattacaggagaaaagt

SEQ ID NO: 271263 - DNA, 25 bp, Probe sequence
tatagcgtggtatgtagatatggaa

SEQ ID NO: 271264 - DNA, 25 bp, Probe sequence
tttcaccaacattcgaagatattaa

SEQ ID NO: 271265 - DNA, 25 bp, Probe sequence
ttaaaacatggtatcaattgaaaga

SEQ ID NO: 271266 - DNA, 25 bp, Probe sequence
ttaatttcaccaacattcgaagata

SEQ ID NO: 271267 - DNA, 25 bp, Probe sequence
ttcaccaacattcgaagatattaaa

SEQ ID NO: 271268 - DNA, 25 bp, Probe sequence
attgatgtctttggcagtgcaaccg

SEQ ID NO: 271269 - DNA, 25 bp, Probe sequence
atcaggggtgcatgatgctaaagtc

SEQ ID NO: 271270 - DNA, 25 bp, Probe sequence
atgtctttggcagtgcaaccgttga

SEQ ID NO: 271271 - DNA, 25 bp, Probe sequence
actatcaggggtgcatgatgctaaa

SEQ ID NO: 271272 - DNA, 25 bp, Probe sequence
aaaattgatgtctttggcagtgcaa

SEQ ID NO: 271273 - DNA, 25 bp, Probe sequence
aaccgttgaagatctggaaaaggct

SEQ ID NO: 271274 - DNA, 25 bp, Probe sequence
aagtcaatttcggagcttccaaaat

SEQ ID NO: 271275 - DNA, 25 bp, Probe sequence
aattgatgtctttggcagtgcaacc

SEQ ID NO: 271276 - DNA, 25 bp, Probe sequence
gctaaagtcaatttcggagcttcca

SEQ ID NO: 271277 - DNA, 25 bp, Probe sequence
gcagtgcaaccgttgaagatctgga

SEQ ID NO: 271278 - DNA, 25 bp, Probe sequence
gcatgatgctaaagtcaatttcgga

SEQ ID NO: 271279 - DNA, 25 bp, Probe sequence
gcaaccgttgaagatctggaaaagg

SEQ ID NO: 271280 - DNA, 25 bp, Probe sequence
gaagatctggaaaaggctggtgctt

SEQ ID NO: 271281 - DNA, 25 bp, Probe sequence
gaactatcaggggtgcatgatgcta

SEQ ID NO: 271282 - DNA, 25 bp, Probe sequence
gagaatcttaaagtggcaccagaga

SEQ ID NO: 271283 - DNA, 25 bp, Probe sequence
gatgtctttggcagtgcaaccgttg

SEQ ID NO: 271284 - DNA, 25 bp, Probe sequence
gatgctaaagtcaatttcggagctt

SEQ ID NO: 271285 - DNA, 25 bp, Probe sequence
gatctggaaaaggctggtgctttcg

SEQ ID NO: 271286 - DNA, 25 bp, Probe sequence
gtctttggcagtgcaaccgttgaag

SEQ ID NO: 271287 - DNA, 25 bp, Probe sequence
gtaaaagaactatcaggggtgcatg

SEQ ID NO: 271288 - DNA, 25 bp, Probe sequence
gtcaatttcggagcttccaaaattg

SEQ ID NO: 271289 - DNA, 25 bp, Probe sequence
gtgcaaccgttgaagatctggaaaa

SEQ ID NO: 271290 - DNA, 25 bp, Probe sequence
ggtgcatgatgctaaagtcaatttc

SEQ ID NO: 271291 - DNA, 25 bp, Probe sequence
ggaaaaggctggtgctttcgagaat

SEQ ID NO: 271292 - DNA, 25 bp, Probe sequence
ggcagtgcaaccgttgaagatctgg

SEQ ID NO: 271293 - DNA, 25 bp, Probe sequence
tgtctttggcagtgcaaccgttgaa

SEQ ID NO: 271294 - DNA, 25 bp, Probe sequence
tgatgtctttggcagtgcaaccgtt

SEQ ID NO: 271295 - DNA, 25 bp, Probe sequence
tcgagaatcttaaagtggcaccaga

SEQ ID NO: 271296 - DNA, 25 bp, Probe sequence
tctggaaaaggctggtgctttcgag

SEQ ID NO: 271297 - DNA, 25 bp, Probe sequence
tctttggcagtgcaaccgttgaaga

SEQ ID NO: 271298 - DNA, 25 bp, Probe sequence
taaagtcaatttcggagcttccaaa

SEQ ID NO: 271299 - DNA, 25 bp, Probe sequence
tttcgagaatcttaaagtggcacca

SEQ ID NO: 271300 - DNA, 25 bp, Probe sequence
ttgatgtctttggcagtgcaaccgt

SEQ ID NO: 271301 - DNA, 25 bp, Probe sequence
ttggcagtgcaaccgttgaagatct

SEQ ID NO: 271302 - DNA, 25 bp, Probe sequence
tctgtccctgttgccaaaacggtag

SEQ ID NO: 271303 - DNA, 25 bp, Probe sequence
attggagctgccatcattggtgaat

SEQ ID NO: 271304 - DNA, 25 bp, Probe sequence
attgccttactattggttattccag

SEQ ID NO: 271305 - DNA, 25 bp, Probe sequence
attcagtccgaattgatgccacagg

SEQ ID NO: 271306 - DNA, 25 bp, Probe sequence
actgccatcgagacagctgatattg

SEQ ID NO: 271307 - DNA, 25 bp, Probe sequence
aaccctgatgaccgtagcagttatt

SEQ ID NO: 271308 - DNA, 25 bp, Probe sequence
aagataaccttgtaacttccatgtt

SEQ ID NO: 271309 - DNA, 25 bp, Probe sequence
aatcggtgctcatgtaggcgtttct

SEQ ID NO: 271310 - DNA, 25 bp, Probe sequence
caaaagtgaactttggcgcttccaa

SEQ ID NO: 271311 - DNA, 25 bp, Probe sequence
gttattccaggctggctaacccttt

SEQ ID NO: 271312 - DNA, 25 bp, Probe sequence
gctgtagcagatgaggtccgcgaaa

SEQ ID NO: 271313 - DNA, 25 bp, Probe sequence
cgctccagcgcaagcattcgtagat

SEQ ID NO: 271314 - DNA, 25 bp, Probe sequence
ccatgtggacgatattgccgtgggt

SEQ ID NO: 271315 - DNA, 25 bp, Probe sequence
gcgaattcatcgatgcaagcggtca

SEQ ID NO: 271316 - DNA, 25 bp, Probe sequence
gcagaggcatccattgttgtcgttc

SEQ ID NO: 271317 - DNA, 25 bp, Probe sequence
gcaagacagtccattcgttcattga

SEQ ID NO: 271318 - DNA, 25 bp, Probe sequence
gaagcacttgaacgtttttctatgg

SEQ ID NO: 271319 - DNA, 25 bp, Probe sequence
gaacatcacgtttgccatcggaatt

SEQ ID NO: 271320 - DNA, 25 bp, Probe sequence
gaacaacctattacattggcagtcc

SEQ ID NO: 271321 - DNA, 25 bp, Probe sequence
gaaatgcatcggttcaagagcttga

SEQ ID NO: 271322 - DNA, 25 bp, Probe sequence
gagccattaaggcaatcgcatttga

SEQ ID NO: 271323 - DNA, 25 bp, Probe sequence
gtttgccacattactgattgctttt

SEQ ID NO: 271324 - DNA, 25 bp, Probe sequence
ggtgctggaacagatactgccatcg

SEQ ID NO: 271325 - DNA, 25 bp, Probe sequence
ggtaccgcagaagcaatcggtgctc

SEQ ID NO: 271326 - DNA, 25 bp, Probe sequence
ggaggacttcacttctattacaggt

SEQ ID NO: 271327 - DNA, 25 bp, Probe sequence
tggaacggaccaaacaatcctcggc

SEQ ID NO: 271328 - DNA, 25 bp, Probe sequence
ggctgtcaaccaggctgctataaca

SEQ ID NO: 271329 - DNA, 25 bp, Probe sequence
tggctaaccctttggattgcgattc

SEQ ID NO: 271330 - DNA, 25 bp, Probe sequence
tgtccgtgtgcattagttatttcta

SEQ ID NO: 271331 - DNA, 25 bp, Probe sequence
tcctcggcgtgattgctgtagcaga

SEQ ID NO: 271332 - DNA, 25 bp, Probe sequence
tatggttattgcggcgctcgttgca

SEQ ID NO: 271333 - DNA, 25 bp, Probe sequence
tattacaggtcggggcattcaaggg

SEQ ID NO: 271334 - DNA, 25 bp, Probe sequence
tataaatggtgtgtcggctgtcaac

SEQ ID NO: 271335 - DNA, 25 bp, Probe sequence
ttgctgcatccactgttggcattgc

SEQ ID NO: 271336 - DNA, 25 bp, Probe sequence
attggcaaaaagctaagattactaa

SEQ ID NO: 271337 - DNA, 25 bp, Probe sequence
attcttctgttcttctttttaatat

SEQ ID NO: 271338 - DNA, 25 bp, Probe sequence
atcaagctcaagtttcggttgcaga

SEQ ID NO: 271339 - DNA, 25 bp, Probe sequence
atggatcgtgcgaaagcaatggacg

SEQ ID NO: 271340 - DNA, 25 bp, Probe sequence
agatgatggtaagataatgcagatt

SEQ ID NO: 271341 - DNA, 25 bp, Probe sequence
aaacgagatggaagttatcaagctc

SEQ ID NO: 271342 - DNA, 25 bp, Probe sequence
aaaactattatggatcgtgcgaaag

SEQ ID NO: 271343 - DNA, 25 bp, Probe sequence
aagttatcaagctcaagtttcggtt

SEQ ID NO: 271344 - DNA, 25 bp, Probe sequence
aatggtgaagattatgcgagtctga

SEQ ID NO: 271345 - DNA, 25 bp, Probe sequence
aatatcaaagcacgaatagcgattc

SEQ ID NO: 271346 - DNA, 25 bp, Probe sequence
aatttatttatgtttcgcaagctat

SEQ ID NO: 271347 - DNA, 25 bp, Probe sequence
aatttagaaaacacagcgcattatg

SEQ ID NO: 271348 - DNA, 25 bp, Probe sequence
aattcagacgtggtagttgtcgaga

SEQ ID NO: 271349 - DNA, 25 bp, Probe sequence
gctcaagtttcggttgcagaattag

SEQ ID NO: 271350 - DNA, 25 bp, Probe sequence
gaatagcgattcgaggtaaaggagt

SEQ ID NO: 271351 - DNA, 25 bp, Probe sequence
gaatagtggtggtttagtcacaagt

SEQ ID NO: 271352 - DNA, 25 bp, Probe sequence
gagaactatcacatttaacgttgaa

SEQ ID NO: 271353 - DNA, 25 bp, Probe sequence
gagaaatctgtagctataaatttag

SEQ ID NO: 271354 - DNA, 25 bp, Probe sequence
gataatgcagattactggatttgat

SEQ ID NO: 271355 - DNA, 25 bp, Probe sequence
gatataacttttagaacaggagaga

SEQ ID NO: 271356 - DNA, 25 bp, Probe sequence
gattaactaaatctagtcgtacatc

SEQ ID NO: 271357 - DNA, 25 bp, Probe sequence
gttgtcgagagaactatcacattta

SEQ ID NO: 271358 - DNA, 25 bp, Probe sequence
gttgctccactagaaatattagatc

SEQ ID NO: 271359 - DNA, 25 bp, Probe sequence
gtttcgcaagctataaattatccaa

SEQ ID NO: 271360 - DNA, 25 bp, Probe sequence
gtgcgaaagcaatggacgaggctat

SEQ ID NO: 271361 - DNA, 25 bp, Probe sequence
gtggtggtttagtcacaagtggttc

SEQ ID NO: 271362 - DNA, 25 bp, Probe sequence
ggtactgtcgaatatttagtagtaa

SEQ ID NO: 271363 - DNA, 25 bp, Probe sequence
ggacgaggctataaaaaatggtgaa

SEQ ID NO: 271364 - DNA, 25 bp, Probe sequence
tgattccatctgaaacaaaattaca

SEQ ID NO: 271365 - DNA, 25 bp, Probe sequence
tgcagattactggatttgattttaa

SEQ ID NO: 271366 - DNA, 25 bp, Probe sequence
tcttctgttcttctttttaatatca

SEQ ID NO: 271367 - DNA, 25 bp, Probe sequence
tatgcgagtctgattgaaaaagcta

SEQ ID NO: 271368 - DNA, 25 bp, Probe sequence
ttagcatgattccatctgaaacaaa

SEQ ID NO: 271369 - DNA, 25 bp, Probe sequence
ttgtttagcatgattccatctgaaa

SEQ ID NO: 271370 - DNA, 25 bp, Probe sequence
agaactggagacatttcggactgga

SEQ ID NO: 271371 - DNA, 25 bp, Probe sequence
atttcctggcgaatttgcggaagca

SEQ ID NO: 271372 - DNA, 25 bp, Probe sequence
caggacacccagaaaaaccctacat

SEQ ID NO: 271373 - DNA, 25 bp, Probe sequence
agttcgtttcaagtatacgcctaat

SEQ ID NO: 271374 - DNA, 25 bp, Probe sequence
accaatgcagggtgtgacttttgat

SEQ ID NO: 271375 - DNA, 25 bp, Probe sequence
aaatcgatgatttcccattaccaag

SEQ ID NO: 271376 - DNA, 25 bp, Probe sequence
aacaaacgaaacccaaccaatgcag

SEQ ID NO: 271377 - DNA, 25 bp, Probe sequence
aacctttaccaatgaggcctgataa

SEQ ID NO: 271378 - DNA, 25 bp, Probe sequence
aagccaccacaaactggcggtgatg

SEQ ID NO: 271379 - DNA, 25 bp, Probe sequence
aatcagtatccctatgagactaaca

SEQ ID NO: 271380 - DNA, 25 bp, Probe sequence
aatacttcactcaagaggcgttcct

SEQ ID NO: 271381 - DNA, 25 bp, Probe sequence
cctacatcacccctgtcataaatga

SEQ ID NO: 271382 - DNA, 25 bp, Probe sequence
gccaggtctttactatttatacact

SEQ ID NO: 271383 - DNA, 25 bp, Probe sequence
gaacactagattcatttcctggcga

SEQ ID NO: 271384 - DNA, 25 bp, Probe sequence
gaacacatcgtattttcatgattgg

SEQ ID NO: 271385 - DNA, 25 bp, Probe sequence
gacagctcattgattgtaggtgggg

SEQ ID NO: 271386 - DNA, 25 bp, Probe sequence
gagaatggcgtgatgcaggttggtt

SEQ ID NO: 271387 - DNA, 25 bp, Probe sequence
gagattgttcaagctcgagttaatg

SEQ ID NO: 271388 - DNA, 25 bp, Probe sequence
gaggcgttccttttatcatgagtga

SEQ ID NO: 271389 - DNA, 25 bp, Probe sequence
gatgctaggtgttactgtcggtggt

SEQ ID NO: 271390 - DNA, 25 bp, Probe sequence
gttcagggccatggactttacacga

SEQ ID NO: 271391 - DNA, 25 bp, Probe sequence
gtaaacggcgaaacctttgacacat

SEQ ID NO: 271392 - DNA, 25 bp, Probe sequence
gtaatgcaatccttctggtttgata

SEQ ID NO: 271393 - DNA, 25 bp, Probe sequence
gggatgttaacagagccaggtcttt

SEQ ID NO: 271394 - DNA, 25 bp, Probe sequence
gggggtcatggtacacataacggtt

SEQ ID NO: 271395 - DNA, 25 bp, Probe sequence
ggggtagctggttggaacttatatg

SEQ ID NO: 271396 - DNA, 25 bp, Probe sequence
ggttcttggaagttaagccaccaca

SEQ ID NO: 271397 - DNA, 25 bp, Probe sequence
ggtagatcgcaagcagcagtaaaca

SEQ ID NO: 271398 - DNA, 25 bp, Probe sequence
ggagagagtaccttcattcatcaca

SEQ ID NO: 271399 - DNA, 25 bp, Probe sequence
tgtgacagaacttgcacctcttaca

SEQ ID NO: 271400 - DNA, 25 bp, Probe sequence
taatgctgactatggtggaacacta

SEQ ID NO: 271401 - DNA, 25 bp, Probe sequence
tatcgagtatcgttttgaacctgat

SEQ ID NO: 271402 - DNA, 25 bp, Probe sequence
ttaacgcacttgttgtggcaccacg

SEQ ID NO: 271403 - DNA, 25 bp, Probe sequence
ttcggactggaattatgtgcctaaa

SEQ ID NO: 271404 - DNA, 25 bp, Probe sequence
atagcattgtacagaaatccccaaa

SEQ ID NO: 271405 - DNA, 25 bp, Probe sequence
ataaacagtactttccagctacaca

SEQ ID NO: 271406 - DNA, 25 bp, Probe sequence
atgcaggcagtagtgatattgatgg

SEQ ID NO: 271407 - DNA, 25 bp, Probe sequence
atggattgcctcaagacggtatcat

SEQ ID NO: 271408 - DNA, 25 bp, Probe sequence
agtagtgatattgatggattgcctc

SEQ ID NO: 271409 - DNA, 25 bp, Probe sequence
agttaaaatcaaagcgctacttgaa

SEQ ID NO: 271410 - DNA, 25 bp, Probe sequence
agcattgtacagaaatccccaaacg

SEQ ID NO: 271411 - DNA, 25 bp, Probe sequence
acgataaacagtactttccagctac

SEQ ID NO: 271412 - DNA, 25 bp, Probe sequence
acttggtacagtgctattttattag

SEQ ID NO: 271413 - DNA, 25 bp, Probe sequence
aaatagcattgtacagaaatcccca

SEQ ID NO: 271414 - DNA, 25 bp, Probe sequence
aaatcaaagcgctacttgaaaacga

SEQ ID NO: 271415 - DNA, 25 bp, Probe sequence
aaataacagttgacgatagtgggaa

SEQ ID NO: 271416 - DNA, 25 bp, Probe sequence
aaacgataaacagtactttccagct

SEQ ID NO: 271417 - DNA, 25 bp, Probe sequence
aagcgctacttgaaaacgataaaca

SEQ ID NO: 271418 - DNA, 25 bp, Probe sequence
cattgtacagaaatccccaaacggt

SEQ ID NO: 271419 - DNA, 25 bp, Probe sequence
gcctcaagacggtatcatttcggta

SEQ ID NO: 271420 - DNA, 25 bp, Probe sequence
gcaggaattattcaaaatagcattg

SEQ ID NO: 271421 - DNA, 25 bp, Probe sequence
gcaggcagtagtgatattgatggat

SEQ ID NO: 271422 - DNA, 25 bp, Probe sequence
gaaacttggtacagtgctattttat

SEQ ID NO: 271423 - DNA, 25 bp, Probe sequence
gacgatagtgggaaacttggtacag

SEQ ID NO: 271424 - DNA, 25 bp, Probe sequence
gatggattgcctcaagacggtatca

SEQ ID NO: 271425 - DNA, 25 bp, Probe sequence
gataaacagtactttccagctacac

SEQ ID NO: 271426 - DNA, 25 bp, Probe sequence
gatagtgggaaacttggtacagtgc

SEQ ID NO: 271427 - DNA, 25 bp, Probe sequence
gatattgatggattgcctcaagacg

SEQ ID NO: 271428 - DNA, 25 bp, Probe sequence
gattgcctcaagacggtatcatttc

SEQ ID NO: 271429 - DNA, 25 bp, Probe sequence
gtgggaaacttggtacagtgctatt

SEQ ID NO: 271430 - DNA, 25 bp, Probe sequence
gggaaacttggtacagtgctatttt

SEQ ID NO: 271431 - DNA, 25 bp, Probe sequence
ggattgcctcaagacggtatcattt

SEQ ID NO: 271432 - DNA, 25 bp, Probe sequence
tggattgcctcaagacggtatcatt

SEQ ID NO: 271433 - DNA, 25 bp, Probe sequence
tgatggattgcctcaagacggtatc

SEQ ID NO: 271434 - DNA, 25 bp, Probe sequence
taaaaataggcgaagcaggaattat

SEQ ID NO: 271435 - DNA, 25 bp, Probe sequence
taccttatgcaggcagtagtgatat

SEQ ID NO: 271436 - DNA, 25 bp, Probe sequence
tattgatggattgcctcaagacggt

SEQ ID NO: 271437 - DNA, 25 bp, Probe sequence
ttgcctcaagacggtatcatttcgg

SEQ ID NO: 271438 - DNA, 25 bp, Probe sequence
attaagcagacagcgccaaaggttg

SEQ ID NO: 271439 - DNA, 25 bp, Probe sequence
atatataagttgattttagacggca

SEQ ID NO: 271440 - DNA, 25 bp, Probe sequence
ataaaaaagctaagccttgtatgta

SEQ ID NO: 271441 - DNA, 25 bp, Probe sequence
atcactcagtggaatcaaataagct

SEQ ID NO: 271442 - DNA, 25 bp, Probe sequence
agtgcaaagcagtttgggattcgat

SEQ ID NO: 271443 - DNA, 25 bp, Probe sequence
acactagtactttgaattctccttt

SEQ ID NO: 271444 - DNA, 25 bp, Probe sequence
aaatcatttatacactagtactttg

SEQ ID NO: 271445 - DNA, 25 bp, Probe sequence
aaatgatactcctaagactgaatta

SEQ ID NO: 271446 - DNA, 25 bp, Probe sequence
aaacgcaatagatgaagtgtctttc

SEQ ID NO: 271447 - DNA, 25 bp, Probe sequence
aaacttgataggtcacatccatttg

SEQ ID NO: 271448 - DNA, 25 bp, Probe sequence
aaaacgccagaatactctttagatg

SEQ ID NO: 271449 - DNA, 25 bp, Probe sequence
aaaatagagccaagagatagcgtat

SEQ ID NO: 271450 - DNA, 25 bp, Probe sequence
aacagacgagttattgcacaagata

SEQ ID NO: 271451 - DNA, 25 bp, Probe sequence
aactgaatgaagctaggtacatcac

SEQ ID NO: 271452 - DNA, 25 bp, Probe sequence
aaggcaagcacgttttagaaatgat

SEQ ID NO: 271453 - DNA, 25 bp, Probe sequence
caaataagcttgatgacgacagtag

SEQ ID NO: 271454 - DNA, 25 bp, Probe sequence
caggataagctgttagaatttgcaa

SEQ ID NO: 271455 - DNA, 25 bp, Probe sequence
gcttgatgacgacagtagcgaaact

SEQ ID NO: 271456 - DNA, 25 bp, Probe sequence
gaactactcataatagttttgtttt

SEQ ID NO: 271457 - DNA, 25 bp, Probe sequence
gaaaacttcataatttatcatggtg

SEQ ID NO: 271458 - DNA, 25 bp, Probe sequence
gacagcgccaaaggttgaaggtgat

SEQ ID NO: 271459 - DNA, 25 bp, Probe sequence
gactacgtcgcagatagtgcaaagc

SEQ ID NO: 271460 - DNA, 25 bp, Probe sequence
gagtacttaagatatggatttgcaa

SEQ ID NO: 271461 - DNA, 25 bp, Probe sequence
gatgaagtgtctttcagcaatgaaa

SEQ ID NO: 271462 - DNA, 25 bp, Probe sequence
gatataactatcaagcaaatcgtat

SEQ ID NO: 271463 - DNA, 25 bp, Probe sequence
gtatgaatttcaaaatcactcagtg

SEQ ID NO: 271464 - DNA, 25 bp, Probe sequence
gtagcgaaactggtaaaacgccaga

SEQ ID NO: 271465 - DNA, 25 bp, Probe sequence
ggtcacatccatttgtaaacgcaat

SEQ ID NO: 271466 - DNA, 25 bp, Probe sequence
ggattatcatgatcatttatcagta

SEQ ID NO: 271467 - DNA, 25 bp, Probe sequence
tcaggtcgcaatcaatacaaagcaa

SEQ ID NO: 271468 - DNA, 25 bp, Probe sequence
tcaacagtcttaaatttaattgctg

SEQ ID NO: 271469 - DNA, 25 bp, Probe sequence
ttgggattcgatatgctaatacgca

SEQ ID NO: 271470 - DNA, 25 bp, Probe sequence
tttacagtttatagaactactcata

SEQ ID NO: 271471 - DNA, 25 bp, Probe sequence
ttattgaagttacggcatatcacat

SEQ ID NO: 271472 - DNA, 25 bp, Probe sequence
attggaccgatagcgagttcttatt

SEQ ID NO: 271473 - DNA, 25 bp, Probe sequence
attctgaatcagttaattggaccga

SEQ ID NO: 271474 - DNA, 25 bp, Probe sequence
attacttctcaaatgcctggtgtta

SEQ ID NO: 271475 - DNA, 25 bp, Probe sequence
atccttattatgttattacttctca

SEQ ID NO: 271476 - DNA, 25 bp, Probe sequence
atgcctggtgttaaatatgcagtga

SEQ ID NO: 271477 - DNA, 25 bp, Probe sequence
agttcttattcgactctaattggat

SEQ ID NO: 271478 - DNA, 25 bp, Probe sequence
actgatacgataaatccacgattca

SEQ ID NO: 271479 - DNA, 25 bp, Probe sequence
actgattttgttttagatggtgtgt

SEQ ID NO: 271480 - DNA, 25 bp, Probe sequence
aagatggttcttcaactgaaattga

SEQ ID NO: 271481 - DNA, 25 bp, Probe sequence
aagtccaaacaccaatgataacagt

SEQ ID NO: 271482 - DNA, 25 bp, Probe sequence
aatggaattcctcttgatttcacac

SEQ ID NO: 271483 - DNA, 25 bp, Probe sequence
aatatactcatacatcaaatcaatt

SEQ ID NO: 271484 - DNA, 25 bp, Probe sequence
aattcctcttgatttcacacctaaa

SEQ ID NO: 271485 - DNA, 25 bp, Probe sequence
caattagttttgcgcctttttcatt

SEQ ID NO: 271486 - DNA, 25 bp, Probe sequence
cagattttaatcagcttatattttt

SEQ ID NO: 271487 - DNA, 25 bp, Probe sequence
caggtgatatttttaagtacaacaa

SEQ ID NO: 271488 - DNA, 25 bp, Probe sequence
gcgagtggaggatttgaactggtta

SEQ ID NO: 271489 - DNA, 25 bp, Probe sequence
gcattataacattagcgccaggtaa

SEQ ID NO: 271490 - DNA, 25 bp, Probe sequence
gcaagggctgaaagtccaaacacca

SEQ ID NO: 271491 - DNA, 25 bp, Probe sequence
gatggtgtgtatgcatatcgagata

SEQ ID NO: 271492 - DNA, 25 bp, Probe sequence
gataacagtgtaactattaacggag

SEQ ID NO: 271493 - DNA, 25 bp, Probe sequence
gatagcgagttcttattcgactcta

SEQ ID NO: 271494 - DNA, 25 bp, Probe sequence
gattaaaggagacgtcagtgatatt

SEQ ID NO: 271495 - DNA, 25 bp, Probe sequence
gttttgcgcctttttcattagtatt

SEQ ID NO: 271496 - DNA, 25 bp, Probe sequence
gtattaaggtttggctatgatggta

SEQ ID NO: 271497 - DNA, 25 bp, Probe sequence
gtgaatacagctaatgttacatcta

SEQ ID NO: 271498 - DNA, 25 bp, Probe sequence
gtgtttaatcgcagacatccttatt

SEQ ID NO: 271499 - DNA, 25 bp, Probe sequence
ggaacggttctactgatacgataaa

SEQ ID NO: 271500 - DNA, 25 bp, Probe sequence
tggtttagatctgtgtttaatcgca

SEQ ID NO: 271501 - DNA, 25 bp, Probe sequence
tcaatttactatttggaacggttct

SEQ ID NO: 271502 - DNA, 25 bp, Probe sequence
tattcgactctaattggatgtttga

SEQ ID NO: 271503 - DNA, 25 bp, Probe sequence
tttcacacctaaatatactcataca

SEQ ID NO: 271504 - DNA, 25 bp, Probe sequence
ttatatttttagatgcaagggctga

SEQ ID NO: 271505 - DNA, 25 bp, Probe sequence
ttgagcattggtttagatctgtgtt

SEQ ID NO: 271506 - DNA, 25 bp, Probe sequence
ataacgtcaacctttctaagtctga

SEQ ID NO: 271507 - DNA, 25 bp, Probe sequence
atcaacgttttacagggcaatccag

SEQ ID NO: 271508 - DNA, 25 bp, Probe sequence
atgtattcaagagcccacgatcgtt

SEQ ID NO: 271509 - DNA, 25 bp, Probe sequence
agaccggtgctaacgaatggaactg

SEQ ID NO: 271510 - DNA, 25 bp, Probe sequence
acctacattgtctactggtacttta

SEQ ID NO: 271511 - DNA, 25 bp, Probe sequence
aagcttgggcgcattcaaaatctat

SEQ ID NO: 271512 - DNA, 25 bp, Probe sequence
aagcttggcaatctgttaaatcgac

SEQ ID NO: 271513 - DNA, 25 bp, Probe sequence
aagacatgggaagagctgcggctga

SEQ ID NO: 271514 - DNA, 25 bp, Probe sequence
aatggcggtcgtcactatggtatcg

SEQ ID NO: 271515 - DNA, 25 bp, Probe sequence
aatgctaatcattttggcggcgaaa

SEQ ID NO: 271516 - DNA, 25 bp, Probe sequence
aatctcatcaagccaatacctacat

SEQ ID NO: 271517 - DNA, 25 bp, Probe sequence
cggcatggtctaacgctaaatcagt

SEQ ID NO: 271518 - DNA, 25 bp, Probe sequence
gatggttatccctttaactagacgt

SEQ ID NO: 271519 - DNA, 25 bp, Probe sequence
gcaagggtcgcatccagggaatgat

SEQ ID NO: 271520 - DNA, 25 bp, Probe sequence
gcaatttcaagttcggcatggtcta

SEQ ID NO: 271521 - DNA, 25 bp, Probe sequence
gaagctatctatttgaccatccaat

SEQ ID NO: 271522 - DNA, 25 bp, Probe sequence
gaacaggttatgcgcatcatcggta

SEQ ID NO: 271523 - DNA, 25 bp, Probe sequence
gagcccacgatcgttttgatgcaat

SEQ ID NO: 271524 - DNA, 25 bp, Probe sequence
gaggagcacacttacatttccaatt

SEQ ID NO: 271525 - DNA, 25 bp, Probe sequence
gatggtgcatcttggttaggcgata

SEQ ID NO: 271526 - DNA, 25 bp, Probe sequence
gattcaaactgtttcttctcaggat

SEQ ID NO: 271527 - DNA, 25 bp, Probe sequence
gattgcttcaatatatcccacaaac

SEQ ID NO: 271528 - DNA, 25 bp, Probe sequence
gtatggactgattacggtggcggta

SEQ ID NO: 271529 - DNA, 25 bp, Probe sequence
ggtagtggcgttcgaagtggttcag

SEQ ID NO: 271530 - DNA, 25 bp, Probe sequence
ggctgacggaacattccatgcaccc

SEQ ID NO: 271531 - DNA, 25 bp, Probe sequence
gggcaggcgatatacgtcgtgcagc

SEQ ID NO: 271532 - DNA, 25 bp, Probe sequence
ggtttggaaatgcttgggacggcgt

SEQ ID NO: 271533 - DNA, 25 bp, Probe sequence
ggaggcggagctaacgctacagtaa

SEQ ID NO: 271534 - DNA, 25 bp, Probe sequence
ggagctcagccaaaagttctgtagg

SEQ ID NO: 271535 - DNA, 25 bp, Probe sequence
ggagcattaacgcaaccgacatttg

SEQ ID NO: 271536 - DNA, 25 bp, Probe sequence
tggcgctcacagtttaacccaagag

SEQ ID NO: 271537 - DNA, 25 bp, Probe sequence
tggttggtctccaagtggtccaaga

SEQ ID NO: 271538 - DNA, 25 bp, Probe sequence
tccatgcaccccaaggacgagatgt

SEQ ID NO: 271539 - DNA, 25 bp, Probe sequence
taaggctgcatctgcttgggcaggc

SEQ ID NO: 271540 - DNA, 25 bp, Probe sequence
gacttccctgggacgtacaatgacg

SEQ ID NO: 271541 - DNA, 25 bp, Probe sequence
atagcgctaatgtcgcaaaagctga

SEQ ID NO: 271542 - DNA, 25 bp, Probe sequence
actgcaactgtaatggcttcagcga

SEQ ID NO: 271543 - DNA, 25 bp, Probe sequence
aaatgtctcgagttggagcgattgc

SEQ ID NO: 271544 - DNA, 25 bp, Probe sequence
aaaaccgcatatgatcgtgtggaat

SEQ ID NO: 271545 - DNA, 25 bp, Probe sequence
aactctttcggtttaaaagcatctg

SEQ ID NO: 271546 - DNA, 25 bp, Probe sequence
aaggcatgaccttggagctgaaatt

SEQ ID NO: 271547 - DNA, 25 bp, Probe sequence
caatgacgatgggcgtatctacacc

SEQ ID NO: 271548 - DNA, 25 bp, Probe sequence
cagaaatggctacaactgcaactgt

SEQ ID NO: 271549 - DNA, 25 bp, Probe sequence
catgttgctgatttacttgcgagat

SEQ ID NO: 271550 - DNA, 25 bp, Probe sequence
gctctggaacaattaggtggcgctt

SEQ ID NO: 271551 - DNA, 25 bp, Probe sequence
gcatctgatgcaaatcatgttgctg

SEQ ID NO: 271552 - DNA, 25 bp, Probe sequence
gcagtaagtggaggcgcaagatttg

SEQ ID NO: 271553 - DNA, 25 bp, Probe sequence
gcagtccgctaagcataaagcactt

SEQ ID NO: 271554 - DNA, 25 bp, Probe sequence
gcaaagctagcaattttaccgttca

SEQ ID NO: 271555 - DNA, 25 bp, Probe sequence
gcaaaccatgggcacagcttctaaa

SEQ ID NO: 271556 - DNA, 25 bp, Probe sequence
gcaagtcaagcggatgtcatgtcaa

SEQ ID NO: 271557 - DNA, 25 bp, Probe sequence
gaagttttatctaactcaggtttag

SEQ ID NO: 271558 - DNA, 25 bp, Probe sequence
gaagcagcaagtggatttttagcct

SEQ ID NO: 271559 - DNA, 25 bp, Probe sequence
gaagccttaaaatcatcgaatacag

SEQ ID NO: 271560 - DNA, 25 bp, Probe sequence
gaaagctaatctgtcagcatttgat

SEQ ID NO: 271561 - DNA, 25 bp, Probe sequence
gaaattagaccatttaggtgtccaa

SEQ ID NO: 271562 - DNA, 25 bp, Probe sequence
gacgcagtacagaagcagtccgcta

SEQ ID NO: 271563 - DNA, 25 bp, Probe sequence
gagacaaaatgacttccctgggacg

SEQ ID NO: 271564 - DNA, 25 bp, Probe sequence
gatagctcaaagtcatttcggtaaa

SEQ ID NO: 271565 - DNA, 25 bp, Probe sequence
gatttaacgcctatgattagagcag

SEQ ID NO: 271566 - DNA, 25 bp, Probe sequence
gatttttagccttgattgaagcggg

SEQ ID NO: 271567 - DNA, 25 bp, Probe sequence
gtaaccaagctactactgcacaact

SEQ ID NO: 271568 - DNA, 25 bp, Probe sequence
gtcatttcggtaaacttgcaagtca

SEQ ID NO: 271569 - DNA, 25 bp, Probe sequence
ggtgtccaagaaggcatgaaaggtt

SEQ ID NO: 271570 - DNA, 25 bp, Probe sequence
ggcttcagcgattaactctttcggt

SEQ ID NO: 271571 - DNA, 25 bp, Probe sequence
tggaggctatgccaggtgttatcag

SEQ ID NO: 271572 - DNA, 25 bp, Probe sequence
taggtattcatttgtctgatgctaa

SEQ ID NO: 271573 - DNA, 25 bp, Probe sequence
ttatttcttggttctacaacaggaa

SEQ ID NO: 271574 - DNA, 25 bp, Probe sequence
atggagcagtatgggtggacattaa

SEQ ID NO: 271575 - DNA, 25 bp, Probe sequence
atgggtggacattaactgaagtcag

SEQ ID NO: 271576 - DNA, 25 bp, Probe sequence
agtcattacaggtacggatttaaga

SEQ ID NO: 271577 - DNA, 25 bp, Probe sequence
agtcagaaaacagccgtatgtaaaa

SEQ ID NO: 271578 - DNA, 25 bp, Probe sequence
agtatgggtggacattaactgaagt

SEQ ID NO: 271579 - DNA, 25 bp, Probe sequence
agcagtatgggtggacattaactga

SEQ ID NO: 271580 - DNA, 25 bp, Probe sequence
actgaagtcagaaaacagccgtatg

SEQ ID NO: 271581 - DNA, 25 bp, Probe sequence
acaaaaagtcattacaggtacggat

SEQ ID NO: 271582 - DNA, 25 bp, Probe sequence
aactgaagtcagaaaacagccgtat

SEQ ID NO: 271583 - DNA, 25 bp, Probe sequence
aagtcattacaggtacggatttaag

SEQ ID NO: 271584 - DNA, 25 bp, Probe sequence
aagtcagaaaacagccgtatgtaaa

SEQ ID NO: 271585 - DNA, 25 bp, Probe sequence
caaaaagtcattacaggtacggatt

SEQ ID NO: 271586 - DNA, 25 bp, Probe sequence
cagaaaacagccgtatgtaaaactt

SEQ ID NO: 271587 - DNA, 25 bp, Probe sequence
cagtatgggtggacattaactgaag

SEQ ID NO: 271588 - DNA, 25 bp, Probe sequence
ctgaagtcagaaaacagccgtatgt

SEQ ID NO: 271589 - DNA, 25 bp, Probe sequence
gcagtatgggtggacattaactgaa

SEQ ID NO: 271590 - DNA, 25 bp, Probe sequence
gaagtcagaaaacagccgtatgtaa

SEQ ID NO: 271591 - DNA, 25 bp, Probe sequence
gaacaaaaagtcattacaggtacgg

SEQ ID NO: 271592 - DNA, 25 bp, Probe sequence
gagcagtatgggtggacattaactg

SEQ ID NO: 271593 - DNA, 25 bp, Probe sequence
gtatgggtggacattaactgaagtc

SEQ ID NO: 271594 - DNA, 25 bp, Probe sequence
gtcagaaaacagccgtatgtaaaac

SEQ ID NO: 271595 - DNA, 25 bp, Probe sequence
gtcattacaggtacggatttaagaa

SEQ ID NO: 271596 - DNA, 25 bp, Probe sequence
gtggacattaactgaagtcagaaaa

SEQ ID NO: 271597 - DNA, 25 bp, Probe sequence
gggtggacattaactgaagtcagaa

SEQ ID NO: 271598 - DNA, 25 bp, Probe sequence
ggtggacattaactgaagtcagaaa

SEQ ID NO: 271599 - DNA, 25 bp, Probe sequence
ggagcagtatgggtggacattaact

SEQ ID NO: 271600 - DNA, 25 bp, Probe sequence
tggacattaactgaagtcagaaaac

SEQ ID NO: 271601 - DNA, 25 bp, Probe sequence
tggagcagtatgggtggacattaac

SEQ ID NO: 271602 - DNA, 25 bp, Probe sequence
tgggtggacattaactgaagtcaga

SEQ ID NO: 271603 - DNA, 25 bp, Probe sequence
tgaagtcagaaaacagccgtatgta

SEQ ID NO: 271604 - DNA, 25 bp, Probe sequence
tcattacaggtacggatttaagaaa

SEQ ID NO: 271605 - DNA, 25 bp, Probe sequence
tcagaaaacagccgtatgtaaaact

SEQ ID NO: 271606 - DNA, 25 bp, Probe sequence
taactgaagtcagaaaacagccgta

SEQ ID NO: 271607 - DNA, 25 bp, Probe sequence
tatgggtggacattaactgaagtca

SEQ ID NO: 271608 - DNA, 25 bp, Probe sequence
atgagacaaaaagagcgacagttat

SEQ ID NO: 271609 - DNA, 25 bp, Probe sequence
aggattgactgaagaagatgttctg

SEQ ID NO: 271610 - DNA, 25 bp, Probe sequence
agatgtaacaatgggcgaagcagaa

SEQ ID NO: 271611 - DNA, 25 bp, Probe sequence
agatgagtactaaaacttatacaaa

SEQ ID NO: 271612 - DNA, 25 bp, Probe sequence
agaagcacctaacgcaacaaaaatg

SEQ ID NO: 271613 - DNA, 25 bp, Probe sequence
acctaacgcaacaaaaatgagacaa

SEQ ID NO: 271614 - DNA, 25 bp, Probe sequence
aaagacagaagaacaatctcaataa

SEQ ID NO: 271615 - DNA, 25 bp, Probe sequence
aacaatgggcgaagcagaaaaatgc

SEQ ID NO: 271616 - DNA, 25 bp, Probe sequence
aacagagagctatacaaaagaagat

SEQ ID NO: 271617 - DNA, 25 bp, Probe sequence
aacaggaaaaacagagagctataca

SEQ ID NO: 271618 - DNA, 25 bp, Probe sequence
aacttatacaaaagccttacaagat

SEQ ID NO: 271619 - DNA, 25 bp, Probe sequence
aagccttacaagatatatttcgaga

SEQ ID NO: 271620 - DNA, 25 bp, Probe sequence
aagcacctaacgcaacaaaaatgag

SEQ ID NO: 271621 - DNA, 25 bp, Probe sequence
aagaagcacctaacgcaacaaaaat

SEQ ID NO: 271622 - DNA, 25 bp, Probe sequence
aagagcgacagttattagtagattt

SEQ ID NO: 271623 - DNA, 25 bp, Probe sequence
aatgctatgagtatttagaattagt

SEQ ID NO: 271624 - DNA, 25 bp, Probe sequence
gccttacaagatatatttcgagaaa

SEQ ID NO: 271625 - DNA, 25 bp, Probe sequence
gcgacagttattagtagatttattt

SEQ ID NO: 271626 - DNA, 25 bp, Probe sequence
gcacctaacgcaacaaaaatgagac

SEQ ID NO: 271627 - DNA, 25 bp, Probe sequence
gaagatgtaacaatgggcgaagcag

SEQ ID NO: 271628 - DNA, 25 bp, Probe sequence
gaagaagattcagaaactgaaccag

SEQ ID NO: 271629 - DNA, 25 bp, Probe sequence
gaagcacctaacgcaacaaaaatga

SEQ ID NO: 271630 - DNA, 25 bp, Probe sequence
gaaactgaaccagaagagatgggaa

SEQ ID NO: 271631 - DNA, 25 bp, Probe sequence
gacaaaaagagcgacagttattagt

SEQ ID NO: 271632 - DNA, 25 bp, Probe sequence
gacagttattagtagatttatttaa

SEQ ID NO: 271633 - DNA, 25 bp, Probe sequence
gagcgacagttattagtagatttat

SEQ ID NO: 271634 - DNA, 25 bp, Probe sequence
gagacaaaaagagcgacagttatta

SEQ ID NO: 271635 - DNA, 25 bp, Probe sequence
gatgtaacaatgggcgaagcagaaa

SEQ ID NO: 271636 - DNA, 25 bp, Probe sequence
gatgaaggattgactgaagaagatg

SEQ ID NO: 271637 - DNA, 25 bp, Probe sequence
gattgactgaagaagatgttctgaa

SEQ ID NO: 271638 - DNA, 25 bp, Probe sequence
gggcgaagcagaaaaatgctatgag

SEQ ID NO: 271639 - DNA, 25 bp, Probe sequence
gggaaagacagaagaacaatctcaa

SEQ ID NO: 271640 - DNA, 25 bp, Probe sequence
taaaaaagaagcacctaacgcaaca

SEQ ID NO: 271641 - DNA, 25 bp, Probe sequence
tatttcgagaaatcaatggtgaaga

SEQ ID NO: 271642 - DNA, 25 bp, Probe sequence
atccaattctagtctcaggcgtatc

SEQ ID NO: 271643 - DNA, 25 bp, Probe sequence
aggtgaaggcaaagtgtcagtaact

SEQ ID NO: 271644 - DNA, 25 bp, Probe sequence
acatccagaatttgttactgtagat

SEQ ID NO: 271645 - DNA, 25 bp, Probe sequence
aaaggtacttaccaagtggcatggg

SEQ ID NO: 271646 - DNA, 25 bp, Probe sequence
aaaggagacgacgtcgtagcttctg

SEQ ID NO: 271647 - DNA, 25 bp, Probe sequence
aacattgcaccaagcacagcaacga

SEQ ID NO: 271648 - DNA, 25 bp, Probe sequence
aaccaatccaattctagtctcaggc

SEQ ID NO: 271649 - DNA, 25 bp, Probe sequence
aataccgatgacaatgttgagccaa

SEQ ID NO: 271650 - DNA, 25 bp, Probe sequence
aatttagaagcggatacaacttatc

SEQ ID NO: 271651 - DNA, 25 bp, Probe sequence
aattctagtctcaggcgtatcattt

SEQ ID NO: 271652 - DNA, 25 bp, Probe sequence
caggagcaattcacggtgtagctga

SEQ ID NO: 271653 - DNA, 25 bp, Probe sequence
gccaaacattgcaccaagcacagca

SEQ ID NO: 271654 - DNA, 25 bp, Probe sequence
gcaccaagcacagcaacgaataaaa

SEQ ID NO: 271655 - DNA, 25 bp, Probe sequence
gaatctagtaaagttgatgtacctc

SEQ ID NO: 271656 - DNA, 25 bp, Probe sequence
gaaggtacttcagtaatcactgcta

SEQ ID NO: 271657 - DNA, 25 bp, Probe sequence
gaaaatacaggagcaattcacggtg

SEQ ID NO: 271658 - DNA, 25 bp, Probe sequence
gacgtcgtagcttctgaacaaggtg

SEQ ID NO: 271659 - DNA, 25 bp, Probe sequence
gagacgacgtcgtagcttctgaaca

SEQ ID NO: 271660 - DNA, 25 bp, Probe sequence
gatggaagcgataagtcaggacaaa

SEQ ID NO: 271661 - DNA, 25 bp, Probe sequence
gatgtacctcaattcaaaaccaatc

SEQ ID NO: 271662 - DNA, 25 bp, Probe sequence
gatacaacttatccaaaaggtactt

SEQ ID NO: 271663 - DNA, 25 bp, Probe sequence
gttgagccaaacattgcaccaagca

SEQ ID NO: 271664 - DNA, 25 bp, Probe sequence
gtacttaccaagtggcatgggaaga

SEQ ID NO: 271665 - DNA, 25 bp, Probe sequence
gtagcttctgaacaaggtgaaggca

SEQ ID NO: 271666 - DNA, 25 bp, Probe sequence
gtacctcaattcaaaaccaatccaa

SEQ ID NO: 271667 - DNA, 25 bp, Probe sequence
gtctactgatggaagcgataagtca

SEQ ID NO: 271668 - DNA, 25 bp, Probe sequence
gtctcaggcgtatcatttacaccag

SEQ ID NO: 271669 - DNA, 25 bp, Probe sequence
gtgaacatccagaatttgttactgt

SEQ ID NO: 271670 - DNA, 25 bp, Probe sequence
gtgtcagtaactttatctaatttag

SEQ ID NO: 271671 - DNA, 25 bp, Probe sequence
ggcgtatcatttacaccagaaacta

SEQ ID NO: 271672 - DNA, 25 bp, Probe sequence
tcacggtgtagctgaaggtacttca

SEQ ID NO: 271673 - DNA, 25 bp, Probe sequence
tcaggacaaatttcagtgacagtaa

SEQ ID NO: 271674 - DNA, 25 bp, Probe sequence
tacaccagaaactaaatcaattatg

SEQ ID NO: 271675 - DNA, 25 bp, Probe sequence
ttcagtgacagtaacaaacggatag

SEQ ID NO: 271676 - DNA, 25 bp, Probe sequence
atatcggtattttgatgatgtggat

SEQ ID NO: 271677 - DNA, 25 bp, Probe sequence
atcggtattttgatgatgtggataa

SEQ ID NO: 271678 - DNA, 25 bp, Probe sequence
agttgaatatcggtattttgatgat

SEQ ID NO: 271679 - DNA, 25 bp, Probe sequence
agaaaaagaaacgctggcagattac

SEQ ID NO: 271680 - DNA, 25 bp, Probe sequence
agaaatgtaaatgtagaggtggaat

SEQ ID NO: 271681 - DNA, 25 bp, Probe sequence
agaaacgctggcagattacttatat

SEQ ID NO: 271682 - DNA, 25 bp, Probe sequence
agaagttgaatatcggtattttgat

SEQ ID NO: 271683 - DNA, 25 bp, Probe sequence
acgctggcagattacttatataaca

SEQ ID NO: 271684 - DNA, 25 bp, Probe sequence
actagagtatgacaatttaaaaatt

SEQ ID NO: 271685 - DNA, 25 bp, Probe sequence
aaagaaaaagaaacgctggcagatt

SEQ ID NO: 271686 - DNA, 25 bp, Probe sequence
aaagaaacgctggcagattacttat

SEQ ID NO: 271687 - DNA, 25 bp, Probe sequence
aaacgctggcagattacttatataa

SEQ ID NO: 271688 - DNA, 25 bp, Probe sequence
aaaaagaaacgctggcagattactt

SEQ ID NO: 271689 - DNA, 25 bp, Probe sequence
aaaagaaacgctggcagattactta

SEQ ID NO: 271690 - DNA, 25 bp, Probe sequence
aacgctggcagattacttatataac

SEQ ID NO: 271691 - DNA, 25 bp, Probe sequence
aagaaacgctggcagattacttata

SEQ ID NO: 271692 - DNA, 25 bp, Probe sequence
aagaaaaagaaacgctggcagatta

SEQ ID NO: 271693 - DNA, 25 bp, Probe sequence
aagttgaatatcggtattttgatga

SEQ ID NO: 271694 - DNA, 25 bp, Probe sequence
aatactagagtatgacaatttaaaa

SEQ ID NO: 271695 - DNA, 25 bp, Probe sequence
aatatcggtattttgatgatgtgga

SEQ ID NO: 271696 - DNA, 25 bp, Probe sequence
cagaagttgaatatcggtattttga

SEQ ID NO: 271697 - DNA, 25 bp, Probe sequence
ctggcagattacttatataacaatc

SEQ ID NO: 271698 - DNA, 25 bp, Probe sequence
cgctggcagattacttatataacaa

SEQ ID NO: 271699 - DNA, 25 bp, Probe sequence
gctggcagattacttatataacaat

SEQ ID NO: 271700 - DNA, 25 bp, Probe sequence
gaatatcggtattttgatgatgtgg

SEQ ID NO: 271701 - DNA, 25 bp, Probe sequence
gaagttgaatatcggtattttgatg

SEQ ID NO: 271702 - DNA, 25 bp, Probe sequence
gaaaaagaaacgctggcagattact

SEQ ID NO: 271703 - DNA, 25 bp, Probe sequence
gaaacgctggcagattacttatata

SEQ ID NO: 271704 - DNA, 25 bp, Probe sequence
gttgaatatcggtattttgatgatg

SEQ ID NO: 271705 - DNA, 25 bp, Probe sequence
tggcagattacttatataacaatcc

SEQ ID NO: 271706 - DNA, 25 bp, Probe sequence
tgaatatcggtattttgatgatgtg

SEQ ID NO: 271707 - DNA, 25 bp, Probe sequence
tcggtattttgatgatgtggataaa

SEQ ID NO: 271708 - DNA, 25 bp, Probe sequence
tatcggtattttgatgatgtggata

SEQ ID NO: 271709 - DNA, 25 bp, Probe sequence
ttgaatatcggtattttgatgatgt

SEQ ID NO: 271710 - DNA, 25 bp, Probe sequence
atggcagaaggacaaggttcttata

SEQ ID NO: 271711 - DNA, 25 bp, Probe sequence
aggtttagcaccagatttagtagat

SEQ ID NO: 271712 - DNA, 25 bp, Probe sequence
agaggattctgcaggttcgttaccc

SEQ ID NO: 271713 - DNA, 25 bp, Probe sequence
agcaccagatttagtagatatgttt

SEQ ID NO: 271714 - DNA, 25 bp, Probe sequence
aaatggtacatcttgggtaggagag

SEQ ID NO: 271715 - DNA, 25 bp, Probe sequence
aacaggtgactggatgaatagaaaa

SEQ ID NO: 271716 - DNA, 25 bp, Probe sequence
aagtagttaaacgcatgacatggga

SEQ ID NO: 271717 - DNA, 25 bp, Probe sequence
aagtctgacatgagtattttcaata

SEQ ID NO: 271718 - DNA, 25 bp, Probe sequence
aatatcacaggtttagcaccagatt

SEQ ID NO: 271719 - DNA, 25 bp, Probe sequence
caagagcaccgtatgtaacagtaat

SEQ ID NO: 271720 - DNA, 25 bp, Probe sequence
cagaagccccagaacctacaaaatt

SEQ ID NO: 271721 - DNA, 25 bp, Probe sequence
gccccagaacctacaaaattaacag

SEQ ID NO: 271722 - DNA, 25 bp, Probe sequence
gccggtatatgtagccttacttaaa

SEQ ID NO: 271723 - DNA, 25 bp, Probe sequence
gaatcggaagatggtttaacaggtc

SEQ ID NO: 271724 - DNA, 25 bp, Probe sequence
gaaggagaagcagaattcttcaaaa

SEQ ID NO: 271725 - DNA, 25 bp, Probe sequence
gaaaaagcagaagccccagaaccta

SEQ ID NO: 271726 - DNA, 25 bp, Probe sequence
gatggtttaacaggtcagccggtat

SEQ ID NO: 271727 - DNA, 25 bp, Probe sequence
gatacacggacagtgaagatcattc

SEQ ID NO: 271728 - DNA, 25 bp, Probe sequence
gttgatgttgatggaacgtcacaag

SEQ ID NO: 271729 - DNA, 25 bp, Probe sequence
gtattcgttggatacacggacagtg

SEQ ID NO: 271730 - DNA, 25 bp, Probe sequence
gtattttcaatattccaagtgatga

SEQ ID NO: 271731 - DNA, 25 bp, Probe sequence
gtaggagagaatacaagagcaccgt

SEQ ID NO: 271732 - DNA, 25 bp, Probe sequence
gtaacagtaattggcgaatcggaag

SEQ ID NO: 271733 - DNA, 25 bp, Probe sequence
gtgaagatcattcagaggattctgc

SEQ ID NO: 271734 - DNA, 25 bp, Probe sequence
ggtcagccggtatatgtagccttac

SEQ ID NO: 271735 - DNA, 25 bp, Probe sequence
gtggtacagttgacctaaatatcac

SEQ ID NO: 271736 - DNA, 25 bp, Probe sequence
ggtacttttagtttagattcaattg

SEQ ID NO: 271737 - DNA, 25 bp, Probe sequence
ggtactaatgaagttaagtctgaca

SEQ ID NO: 271738 - DNA, 25 bp, Probe sequence
ggtattgtatacggttatcatgaag

SEQ ID NO: 271739 - DNA, 25 bp, Probe sequence
ggaacgtcacaaggtattgtatacg

SEQ ID NO: 271740 - DNA, 25 bp, Probe sequence
tggagtttttaacccagaagcaaca

SEQ ID NO: 271741 - DNA, 25 bp, Probe sequence
taaacacagttattggacgtactaa

SEQ ID NO: 271742 - DNA, 25 bp, Probe sequence
tatgtagccttacttaaaggtactt

SEQ ID NO: 271743 - DNA, 25 bp, Probe sequence
ttgcatctaacaaacgtgtatggat

SEQ ID NO: 271744 - DNA, 25 bp, Probe sequence
attacaaagtcactgaaaacgctga

SEQ ID NO: 271745 - DNA, 25 bp, Probe sequence
attacacctgtttatgatttgcctt

SEQ ID NO: 271746 - DNA, 25 bp, Probe sequence
atctgatgcagagctcaaaacacat

SEQ ID NO: 271747 - DNA, 25 bp, Probe sequence
acctgtttatgatttgccttcagac

SEQ ID NO: 271748 - DNA, 25 bp, Probe sequence
aacgttatgtgatgtcgagacgata

SEQ ID NO: 271749 - DNA, 25 bp, Probe sequence
aaggaattttattatctgatgcaga

SEQ ID NO: 271750 - DNA, 25 bp, Probe sequence
aatatctcagtgaagaatacttaat

SEQ ID NO: 271751 - DNA, 25 bp, Probe sequence
aatttaattcaagcatctagtcagt

SEQ ID NO: 271752 - DNA, 25 bp, Probe sequence
ctttgttgttattacacctgtttat

SEQ ID NO: 271753 - DNA, 25 bp, Probe sequence
ctagtcagttagatgcttattttga

SEQ ID NO: 271754 - DNA, 25 bp, Probe sequence
gctgaaacttccaaaccctttgttg

SEQ ID NO: 271755 - DNA, 25 bp, Probe sequence
gctcaaaacacatataaattctaga

SEQ ID NO: 271756 - DNA, 25 bp, Probe sequence
gcagagctcaaaacacatataaatt

SEQ ID NO: 271757 - DNA, 25 bp, Probe sequence
gaatatactattacaaagtcactga

SEQ ID NO: 271758 - DNA, 25 bp, Probe sequence
gaataagatacctgttatatcaaca

SEQ ID NO: 271759 - DNA, 25 bp, Probe sequence
gaaactaaacgttatgtgatgtcga

SEQ ID NO: 271760 - DNA, 25 bp, Probe sequence
gactttatgtctgataaatatctca

SEQ ID NO: 271761 - DNA, 25 bp, Probe sequence
gacgatatcaaggcatacccaaaaa

SEQ ID NO: 271762 - DNA, 25 bp, Probe sequence
gagacgatatcaaggcatacccaaa

SEQ ID NO: 271763 - DNA, 25 bp, Probe sequence
gatgtagaatcttcaaataatcaga

SEQ ID NO: 271764 - DNA, 25 bp, Probe sequence
gatgcttattttgaagaaactaaac

SEQ ID NO: 271765 - DNA, 25 bp, Probe sequence
gatacctgttatatcaacaaaattt

SEQ ID NO: 271766 - DNA, 25 bp, Probe sequence
gttgttattacacctgtttatgatt

SEQ ID NO: 271767 - DNA, 25 bp, Probe sequence
gtttatgatttgccttcagacttta

SEQ ID NO: 271768 - DNA, 25 bp, Probe sequence
gtcactgaaaacgctgaaacttcca

SEQ ID NO: 271769 - DNA, 25 bp, Probe sequence
gtcgagacgatatcaaggcataccc

SEQ ID NO: 271770 - DNA, 25 bp, Probe sequence
ggcatacccaaaaatatatattata

SEQ ID NO: 271771 - DNA, 25 bp, Probe sequence
tgatttgccttcagactttatgtct

SEQ ID NO: 271772 - DNA, 25 bp, Probe sequence
tacacctgtttatgatttgccttca

SEQ ID NO: 271773 - DNA, 25 bp, Probe sequence
tatgatttgccttcagactttatgt

SEQ ID NO: 271774 - DNA, 25 bp, Probe sequence
tatcaaggcatacccaaaaatatat

SEQ ID NO: 271775 - DNA, 25 bp, Probe sequence
ttataaaaatcagcgcatcgaatag

SEQ ID NO: 271776 - DNA, 25 bp, Probe sequence
ttaattcaagcatctagtcagttag

SEQ ID NO: 271777 - DNA, 25 bp, Probe sequence
ttgccttcagactttatgtctgata

SEQ ID NO: 271778 - DNA, 25 bp, Probe sequence
atatacaccaagaggttttggagtt

SEQ ID NO: 271779 - DNA, 25 bp, Probe sequence
agtcaagaaagggctgttttaattg

SEQ ID NO: 271780 - DNA, 25 bp, Probe sequence
acattagctgctagcgaacgtaagt

SEQ ID NO: 271781 - DNA, 25 bp, Probe sequence
aaagggatacctgaagtgttgaata

SEQ ID NO: 271782 - DNA, 25 bp, Probe sequence
aaaacattagctgctagcgaacgta

SEQ ID NO: 271783 - DNA, 25 bp, Probe sequence
aagatacgggtgccagtatagaaga

SEQ ID NO: 271784 - DNA, 25 bp, Probe sequence
aatgactaaatctaagccttataca

SEQ ID NO: 271785 - DNA, 25 bp, Probe sequence
aatgaagcatctgaattttttataa

SEQ ID NO: 271786 - DNA, 25 bp, Probe sequence
aatctaagccttatacaaaagttgg

SEQ ID NO: 271787 - DNA, 25 bp, Probe sequence
caccaagaggttttggagttattgc

SEQ ID NO: 271788 - DNA, 25 bp, Probe sequence
gagctttaaagatacgggtgccagt

SEQ ID NO: 271789 - DNA, 25 bp, Probe sequence
cgggtgccagtatagaagaaatgac

SEQ ID NO: 271790 - DNA, 25 bp, Probe sequence
gctgctagcgaacgtaagtatagag

SEQ ID NO: 271791 - DNA, 25 bp, Probe sequence
gcatctgaattttttataaaggctt

SEQ ID NO: 271792 - DNA, 25 bp, Probe sequence
gcaggctaagagtgataaagcttta

SEQ ID NO: 271793 - DNA, 25 bp, Probe sequence
gcaatgcaggctaagagtgataaag

SEQ ID NO: 271794 - DNA, 25 bp, Probe sequence
gaataaattagaatcggtatacggt

SEQ ID NO: 271795 - DNA, 25 bp, Probe sequence
gaatcgcaaaaacattattcacttg

SEQ ID NO: 271796 - DNA, 25 bp, Probe sequence
gaatcggtatacggtaaacaagcaa

SEQ ID NO: 271797 - DNA, 25 bp, Probe sequence
gaaagggctgttttaattgaatggg

SEQ ID NO: 271798 - DNA, 25 bp, Probe sequence
gaaatgactaaatctaagccttata

SEQ ID NO: 271799 - DNA, 25 bp, Probe sequence
gagttcgagagctttaaagatacgg

SEQ ID NO: 271800 - DNA, 25 bp, Probe sequence
gggctgttttaattgaatgggtagg

SEQ ID NO: 271801 - DNA, 25 bp, Probe sequence
gggatacctgaagtgttgaataaat

SEQ ID NO: 271802 - DNA, 25 bp, Probe sequence
ggtaaacaagcaatgcaggctaaga

SEQ ID NO: 271803 - DNA, 25 bp, Probe sequence
ggtatacggtaaacaagcaatgcag

SEQ ID NO: 271804 - DNA, 25 bp, Probe sequence
ggagttattgcaaaaacattagctg

SEQ ID NO: 271805 - DNA, 25 bp, Probe sequence
tgaacatggttatacaagagatgga

SEQ ID NO: 271806 - DNA, 25 bp, Probe sequence
tcgcaaaaacattattcacttgaat

SEQ ID NO: 271807 - DNA, 25 bp, Probe sequence
tcacttgaatgaacatggttataca

SEQ ID NO: 271808 - DNA, 25 bp, Probe sequence
tataaaaaaggagttggccagataa

SEQ ID NO: 271809 - DNA, 25 bp, Probe sequence
tatacggtaaacaagcaatgcaggc

SEQ ID NO: 271810 - DNA, 25 bp, Probe sequence
ttagctgctagcgaacgtaagtata

SEQ ID NO: 271811 - DNA, 25 bp, Probe sequence
ttgcaaaaacattagctgctagcga

SEQ ID NO: 271812 - DNA, 25 bp, Probe sequence
attgatacaccagatattggctata

SEQ ID NO: 271813 - DNA, 25 bp, Probe sequence
attgacagtgcattatattccgata

SEQ ID NO: 271814 - DNA, 25 bp, Probe sequence
atattccgataaattattcaacatt

SEQ ID NO: 271815 - DNA, 25 bp, Probe sequence
atatctaccacaaacaaatcactta

SEQ ID NO: 271816 - DNA, 25 bp, Probe sequence
ataatccttctatgaaagatagaga

SEQ ID NO: 271817 - DNA, 25 bp, Probe sequence
atctaccacaaacaaatcacttagt

SEQ ID NO: 271818 - DNA, 25 bp, Probe sequence
agtgcattatattccgataaattat

SEQ ID NO: 271819 - DNA, 25 bp, Probe sequence
acagtgcattatattccgataaatt

SEQ ID NO: 271820 - DNA, 25 bp, Probe sequence
aaattgacagtgcattatattccga

SEQ ID NO: 271821 - DNA, 25 bp, Probe sequence
aaatcacttagttaaaattgacagt

SEQ ID NO: 271822 - DNA, 25 bp, Probe sequence
aagaattgatacaccagatattggc

SEQ ID NO: 271823 - DNA, 25 bp, Probe sequence
aatgaaattgtatagttgcttttgt

SEQ ID NO: 271824 - DNA, 25 bp, Probe sequence
aatacagtggttttatcagaaaaat

SEQ ID NO: 271825 - DNA, 25 bp, Probe sequence
aatatctaccacaaacaaatcactt

SEQ ID NO: 271826 - DNA, 25 bp, Probe sequence
aattgacagtgcattatattccgat

SEQ ID NO: 271827 - DNA, 25 bp, Probe sequence
aattgtatagttgcttttgtaaaat

SEQ ID NO: 271828 - DNA, 25 bp, Probe sequence
caccagatattggctataatacagt

SEQ ID NO: 271829 - DNA, 25 bp, Probe sequence
gctataatacagtggttttatcaga

SEQ ID NO: 271830 - DNA, 25 bp, Probe sequence
gaattgatacaccagatattggcta

SEQ ID NO: 271831 - DNA, 25 bp, Probe sequence
gaatatctaccacaaacaaatcact

SEQ ID NO: 271832 - DNA, 25 bp, Probe sequence
gaaataagaattgatacaccagata

SEQ ID NO: 271833 - DNA, 25 bp, Probe sequence
gaaattttaaaagcgactgaatcaa

SEQ ID NO: 271834 - DNA, 25 bp, Probe sequence
gaaattgtatagttgcttttgtaaa

SEQ ID NO: 271835 - DNA, 25 bp, Probe sequence
gacagtgcattatattccgataaat

SEQ ID NO: 271836 - DNA, 25 bp, Probe sequence
gagaaattttaaaagcgactgaatc

SEQ ID NO: 271837 - DNA, 25 bp, Probe sequence
gataaattattcaacattgtagaaa

SEQ ID NO: 271838 - DNA, 25 bp, Probe sequence
gatacaccagatattggctataata

SEQ ID NO: 271839 - DNA, 25 bp, Probe sequence
gatattggctataatacagtggttt

SEQ ID NO: 271840 - DNA, 25 bp, Probe sequence
tccgataaattattcaacattgtag

SEQ ID NO: 271841 - DNA, 25 bp, Probe sequence
tctaccacaaacaaatcacttagtt

SEQ ID NO: 271842 - DNA, 25 bp, Probe sequence
tacaccagatattggctataataca

SEQ ID NO: 271843 - DNA, 25 bp, Probe sequence
taccacaaacaaatcacttagttaa

SEQ ID NO: 271844 - DNA, 25 bp, Probe sequence
ttgacagtgcattatattccgataa

SEQ ID NO: 271845 - DNA, 25 bp, Probe sequence
ttggctataatacagtggttttatc

SEQ ID NO: 271846 - DNA, 25 bp, Probe sequence
attgtggttgagaattgactataat

SEQ ID NO: 271847 - DNA, 25 bp, Probe sequence
atacccgcttttttgtacagcgatt

SEQ ID NO: 271848 - DNA, 25 bp, Probe sequence
atactcaaatgaccaatctagaagc

SEQ ID NO: 271849 - DNA, 25 bp, Probe sequence
atcggctaagtctgaattactatta

SEQ ID NO: 271850 - DNA, 25 bp, Probe sequence
atgacttggaatacccgcttttttg

SEQ ID NO: 271851 - DNA, 25 bp, Probe sequence
atgaccaatctagaagcaaggtgtt

SEQ ID NO: 271852 - DNA, 25 bp, Probe sequence
aggtctcattcaatcggctaagtct

SEQ ID NO: 271853 - DNA, 25 bp, Probe sequence
agtggggttccagattatgacaaag

SEQ ID NO: 271854 - DNA, 25 bp, Probe sequence
aagatgacttggaatacccgctttt

SEQ ID NO: 271855 - DNA, 25 bp, Probe sequence
aaggtctcattcaatcggctaagtc

SEQ ID NO: 271856 - DNA, 25 bp, Probe sequence
caatctagaagcaaggtgtttaatg

SEQ ID NO: 271857 - DNA, 25 bp, Probe sequence
caaagatgacttggaatacccgctt

SEQ ID NO: 271858 - DNA, 25 bp, Probe sequence
ctcaaatgaccaatctagaagcaag

SEQ ID NO: 271859 - DNA, 25 bp, Probe sequence
gcgattaaatatatcattgcaagag

SEQ ID NO: 271860 - DNA, 25 bp, Probe sequence
gcttttttgtacagcgattaaatat

SEQ ID NO: 271861 - DNA, 25 bp, Probe sequence
gcaagagattatgaaagtcgtggat

SEQ ID NO: 271862 - DNA, 25 bp, Probe sequence
gaatacccgcttttttgtacagcga

SEQ ID NO: 271863 - DNA, 25 bp, Probe sequence
gaattactattaagtggggttccag

SEQ ID NO: 271864 - DNA, 25 bp, Probe sequence
gaaggtctcattcaatcggctaagt

SEQ ID NO: 271865 - DNA, 25 bp, Probe sequence
gaaaatgatttaattgaaggtctca

SEQ ID NO: 271866 - DNA, 25 bp, Probe sequence
gaaagtcgtggatactcaaatgacc

SEQ ID NO: 271867 - DNA, 25 bp, Probe sequence
gagaattgactataatttcgaaaat

SEQ ID NO: 271868 - DNA, 25 bp, Probe sequence
gatgacttggaatacccgctttttt

SEQ ID NO: 271869 - DNA, 25 bp, Probe sequence
gtcgtggatactcaaatgaccaatc

SEQ ID NO: 271870 - DNA, 25 bp, Probe sequence
gtacagcgattaaatatatcattgc

SEQ ID NO: 271871 - DNA, 25 bp, Probe sequence
gtctcattcaatcggctaagtctga

SEQ ID NO: 271872 - DNA, 25 bp, Probe sequence
gtggatactcaaatgaccaatctag

SEQ ID NO: 271873 - DNA, 25 bp, Probe sequence
ggggttccagattatgacaaagatg

SEQ ID NO: 271874 - DNA, 25 bp, Probe sequence
ggttccagattatgacaaagatgac

SEQ ID NO: 271875 - DNA, 25 bp, Probe sequence
ttggaatacccgcttttttgtacag

SEQ ID NO: 271876 - DNA, 25 bp, Probe sequence
tggaatacccgcttttttgtacagc

SEQ ID NO: 271877 - DNA, 25 bp, Probe sequence
tgacttggaatacccgcttttttgt

SEQ ID NO: 271878 - DNA, 25 bp, Probe sequence
tcaatcggctaagtctgaattacta

SEQ ID NO: 271879 - DNA, 25 bp, Probe sequence
tacccgcttttttgtacagcgatta

SEQ ID NO: 271880 - DNA, 25 bp, Probe sequence
atcgtcacgcgattttaccaaatga

SEQ ID NO: 271881 - DNA, 25 bp, Probe sequence
agtatttggcaaaccagtagtattt

SEQ ID NO: 271882 - DNA, 25 bp, Probe sequence
agagtttcatacactttagacgatg

SEQ ID NO: 271883 - DNA, 25 bp, Probe sequence
actgggttgaaaacgcactacaatc

SEQ ID NO: 271884 - DNA, 25 bp, Probe sequence
aaatacaggtccattacccagctaa

SEQ ID NO: 271885 - DNA, 25 bp, Probe sequence
aaaccttcaatggaggcacaacgtt

SEQ ID NO: 271886 - DNA, 25 bp, Probe sequence
aacgtacattagacagtgcattcag

SEQ ID NO: 271887 - DNA, 25 bp, Probe sequence
aagagcgtaaagatgccttagcagt

SEQ ID NO: 271888 - DNA, 25 bp, Probe sequence
aaggcagagttttatcgtcacgcga

SEQ ID NO: 271889 - DNA, 25 bp, Probe sequence
aatctggattagaacacatgtcatt

SEQ ID NO: 271890 - DNA, 25 bp, Probe sequence
aattattagtgttctttcaaatgga

SEQ ID NO: 271891 - DNA, 25 bp, Probe sequence
caaatttctttgacacaccagcaga

SEQ ID NO: 271892 - DNA, 25 bp, Probe sequence
cgcactacaatcaggattagcagct

SEQ ID NO: 271893 - DNA, 25 bp, Probe sequence
gcatggtatgatcagcaacgtacat

SEQ ID NO: 271894 - DNA, 25 bp, Probe sequence
gcagcagttaaacctattgtgggag

SEQ ID NO: 271895 - DNA, 25 bp, Probe sequence
gaaaaagctcgtctaactaacatta

SEQ ID NO: 271896 - DNA, 25 bp, Probe sequence
gaaattgtttcagaaccatttgcta

SEQ ID NO: 271897 - DNA, 25 bp, Probe sequence
gacgatgatgatttcattacagacg

SEQ ID NO: 271898 - DNA, 25 bp, Probe sequence
gagtcagaaagcaacagatccaaat

SEQ ID NO: 271899 - DNA, 25 bp, Probe sequence
gatggaacaacttatgacactgata

SEQ ID NO: 271900 - DNA, 25 bp, Probe sequence
gatgccttagcagtaagtcctaaat

SEQ ID NO: 271901 - DNA, 25 bp, Probe sequence
gatacagtcaagttcactactaata

SEQ ID NO: 271902 - DNA, 25 bp, Probe sequence
gattatcgtgataacgcaacaattt

SEQ ID NO: 271903 - DNA, 25 bp, Probe sequence
gttgagggagcagacatgtatgatg

SEQ ID NO: 271904 - DNA, 25 bp, Probe sequence
gtatttgctgcaatttcagatactg

SEQ ID NO: 271905 - DNA, 25 bp, Probe sequence
gtatgatgctattattaacgcttta

SEQ ID NO: 271906 - DNA, 25 bp, Probe sequence
gtagtatttacagatgcagcagtta

SEQ ID NO: 271907 - DNA, 25 bp, Probe sequence
ggtttagagattccaagagtttcat

SEQ ID NO: 271908 - DNA, 25 bp, Probe sequence
ggagaagcttatcaatctttaagtg

SEQ ID NO: 271909 - DNA, 25 bp, Probe sequence
taagctcttaccaaaaacactttct

SEQ ID NO: 271910 - DNA, 25 bp, Probe sequence
tatgcgatatgcagattatgtcaaa

SEQ ID NO: 271911 - DNA, 25 bp, Probe sequence
tttattacacgctttaccaacagga

SEQ ID NO: 271912 - DNA, 25 bp, Probe sequence
ttcagatactgtaattcatggatca

SEQ ID NO: 271913 - DNA, 25 bp, Probe sequence
ttcaggtggagataagctcttacca

SEQ ID NO: 271914 - DNA, 25 bp, Probe sequence
atgaactaggagacatcagtgaaat

SEQ ID NO: 271915 - DNA, 25 bp, Probe sequence
atgggttatgactgtaggtaatgca

SEQ ID NO: 271916 - DNA, 25 bp, Probe sequence
agcggcatcaattgctagtgttatc

SEQ ID NO: 271917 - DNA, 25 bp, Probe sequence
acagatgctgttagtaattcagctt

SEQ ID NO: 271918 - DNA, 25 bp, Probe sequence
aaattcatctggaggcagtgtattt

SEQ ID NO: 271919 - DNA, 25 bp, Probe sequence
aagaaagacagcggatttacttgaa

SEQ ID NO: 271920 - DNA, 25 bp, Probe sequence
aagagcaatataagcgtttcgagaa

SEQ ID NO: 271921 - DNA, 25 bp, Probe sequence
aatatgctaaaaatgcatcctgcaa

SEQ ID NO: 271922 - DNA, 25 bp, Probe sequence
aattgctagtgttatcgctatgagt

SEQ ID NO: 271923 - DNA, 25 bp, Probe sequence
cagaaacttggcttactgcagaaga

SEQ ID NO: 271924 - DNA, 25 bp, Probe sequence
catctggaggcagtgtatttgaagg

SEQ ID NO: 271925 - DNA, 25 bp, Probe sequence
gccttgtctttcggcttgatagatg

SEQ ID NO: 271926 - DNA, 25 bp, Probe sequence
gctgctagtatctctaaagagcaat

SEQ ID NO: 271927 - DNA, 25 bp, Probe sequence
gcatcctgcaaaaattaatatctat

SEQ ID NO: 271928 - DNA, 25 bp, Probe sequence
gaagaagccttgtctttcggcttga

SEQ ID NO: 271929 - DNA, 25 bp, Probe sequence
gaaatagctgctagtatctctaaag

SEQ ID NO: 271930 - DNA, 25 bp, Probe sequence
gacagcggatttacttgaaaaaaca

SEQ ID NO: 271931 - DNA, 25 bp, Probe sequence
gagaacgtcccagaagatttaaaga

SEQ ID NO: 271932 - DNA, 25 bp, Probe sequence
gagaaaaaattaaacgcgaatgcga

SEQ ID NO: 271933 - DNA, 25 bp, Probe sequence
gagtggtgacactatttttatgcac

SEQ ID NO: 271934 - DNA, 25 bp, Probe sequence
gatcaagaacacttaaaacagatgt

SEQ ID NO: 271935 - DNA, 25 bp, Probe sequence
gatacatctgaattggttgaaacac

SEQ ID NO: 271936 - DNA, 25 bp, Probe sequence
gtttcgagaacgtcccagaagattt

SEQ ID NO: 271937 - DNA, 25 bp, Probe sequence
gttagtaattcagcttatttagata

SEQ ID NO: 271938 - DNA, 25 bp, Probe sequence
gttatcgctatgagtggtgacacta

SEQ ID NO: 271939 - DNA, 25 bp, Probe sequence
gtgatgtaactgctacagatttcaa

SEQ ID NO: 271940 - DNA, 25 bp, Probe sequence
ggtgacactatttttatgcacaaaa

SEQ ID NO: 271941 - DNA, 25 bp, Probe sequence
ggtttgaaagtgatgtaactgctac

SEQ ID NO: 271942 - DNA, 25 bp, Probe sequence
ggttgaaacacctaaagaaagtatg

SEQ ID NO: 271943 - DNA, 25 bp, Probe sequence
tgttcatataaattcatctggaggc

SEQ ID NO: 271944 - DNA, 25 bp, Probe sequence
tgcagaagaagccttgtctttcggc

SEQ ID NO: 271945 - DNA, 25 bp, Probe sequence
tcggcttgatagatgaaattttagg

SEQ ID NO: 271946 - DNA, 25 bp, Probe sequence
taagcgtttcgagaacgtcccagaa

SEQ ID NO: 271947 - DNA, 25 bp, Probe sequence
taatgattcataattcatgggttat

SEQ ID NO: 271948 - DNA, 25 bp, Probe sequence
attgccaatcgtcaaacagtatgaa

SEQ ID NO: 271949 - DNA, 25 bp, Probe sequence
attagtccgattgatgtgttgaaga

SEQ ID NO: 271950 - DNA, 25 bp, Probe sequence
attattccattcatgctgcaactgg

SEQ ID NO: 271951 - DNA, 25 bp, Probe sequence
atcatcaaccatcaaagcttttctt

SEQ ID NO: 271952 - DNA, 25 bp, Probe sequence
agctttatgactttagcccatggaa

SEQ ID NO: 271953 - DNA, 25 bp, Probe sequence
acgagacatctatcatcaaccatca

SEQ ID NO: 271954 - DNA, 25 bp, Probe sequence
aaagcttttcttattaaatccagat

SEQ ID NO: 271955 - DNA, 25 bp, Probe sequence
aaacgatattttcagctattacaaa

SEQ ID NO: 271956 - DNA, 25 bp, Probe sequence
aacacatcgtggcatctaatatggt

SEQ ID NO: 271957 - DNA, 25 bp, Probe sequence
aacagattttacttgcagcatacct

SEQ ID NO: 271958 - DNA, 25 bp, Probe sequence
aactttattattccattcatgctgc

SEQ ID NO: 271959 - DNA, 25 bp, Probe sequence
aagagcctggtgttgaaatcgaacc

SEQ ID NO: 271960 - DNA, 25 bp, Probe sequence
aatccagatgttgttgaaatgttaa

SEQ ID NO: 271961 - DNA, 25 bp, Probe sequence
aatacgcttgaaactaatgaaacga

SEQ ID NO: 271962 - DNA, 25 bp, Probe sequence
aattcgatggctagtttgcccttga

SEQ ID NO: 271963 - DNA, 25 bp, Probe sequence
cccaattgacacgccacttgaatta

SEQ ID NO: 271964 - DNA, 25 bp, Probe sequence
gcggtgatttatacccaattgacac

SEQ ID NO: 271965 - DNA, 25 bp, Probe sequence
gctagtttgcccttgaaaatgtatg

SEQ ID NO: 271966 - DNA, 25 bp, Probe sequence
gcagttcgtagtggttactacacta

SEQ ID NO: 271967 - DNA, 25 bp, Probe sequence
gcagcataccttattgccaatcgtc

SEQ ID NO: 271968 - DNA, 25 bp, Probe sequence
gaaggtggagataagccgctaataa

SEQ ID NO: 271969 - DNA, 25 bp, Probe sequence
gaagtgtactttaaagcagttcgta

SEQ ID NO: 271970 - DNA, 25 bp, Probe sequence
gaacctttaatcttacagaaatgca

SEQ ID NO: 271971 - DNA, 25 bp, Probe sequence
gaaaaccaatcacgtgaactttatt

SEQ ID NO: 271972 - DNA, 25 bp, Probe sequence
gagaatattgtcacacgcataaaga

SEQ ID NO: 271973 - DNA, 25 bp, Probe sequence
gtgtcaccgaataattctctgagca

SEQ ID NO: 271974 - DNA, 25 bp, Probe sequence
ggaaactacttactaaaacagacag

SEQ ID NO: 271975 - DNA, 25 bp, Probe sequence
ggacatgttgcattttaaacacatc

SEQ ID NO: 271976 - DNA, 25 bp, Probe sequence
tgcatatgtgctaattgaacgagac

SEQ ID NO: 271977 - DNA, 25 bp, Probe sequence
tctgatttacttacagtgtcaccga

SEQ ID NO: 271978 - DNA, 25 bp, Probe sequence
tagctaacgtttttcaattgccctc

SEQ ID NO: 271979 - DNA, 25 bp, Probe sequence
tattattccaagagcctggtgttga

SEQ ID NO: 271980 - DNA, 25 bp, Probe sequence
ttaagggctgatagtgcaacacaag

SEQ ID NO: 271981 - DNA, 25 bp, Probe sequence
ttctctgagcagttttgattttatt

SEQ ID NO: 271982 - DNA, 25 bp, Probe sequence
atgcagagcaagtcactcaagggaa

SEQ ID NO: 271983 - DNA, 25 bp, Probe sequence
atgatttatcagaaacagaggactt

SEQ ID NO: 271984 - DNA, 25 bp, Probe sequence
atggtatgcagagcaagtcactcaa

SEQ ID NO: 271985 - DNA, 25 bp, Probe sequence
aggatctaaacgtcaacttgtatta

SEQ ID NO: 271986 - DNA, 25 bp, Probe sequence
agcaagtcactcaagggaaaataaa

SEQ ID NO: 271987 - DNA, 25 bp, Probe sequence
acatggtatgcagagcaagtcactc

SEQ ID NO: 271988 - DNA, 25 bp, Probe sequence
aaagcagatatcgtaaaatagatgg

SEQ ID NO: 271989 - DNA, 25 bp, Probe sequence
aaggatctaaacgtcaacttgtatt

SEQ ID NO: 271990 - DNA, 25 bp, Probe sequence
aataataatcctttaatgaaatggt

SEQ ID NO: 271991 - DNA, 25 bp, Probe sequence
caaaggatctaaacgtcaacttgta

SEQ ID NO: 271992 - DNA, 25 bp, Probe sequence
cagaaacagaggactttacagccgc

SEQ ID NO: 271993 - DNA, 25 bp, Probe sequence
catggtatgcagagcaagtcactca

SEQ ID NO: 271994 - DNA, 25 bp, Probe sequence
cttcaccaaaactattaacaacatg

SEQ ID NO: 271995 - DNA, 25 bp, Probe sequence
ccttcaccaaaactattaacaacat

SEQ ID NO: 271996 - DNA, 25 bp, Probe sequence
gcatttttaaacacatatacagata

SEQ ID NO: 271997 - DNA, 25 bp, Probe sequence
gcagagcaagtcactcaagggaaaa

SEQ ID NO: 271998 - DNA, 25 bp, Probe sequence
gcagcatttttaaacacatatacag

SEQ ID NO: 271999 - DNA, 25 bp, Probe sequence
gactaccaagatgttttaaattgga

SEQ ID NO: 272000 - DNA, 25 bp, Probe sequence
gaccttgagccctgcattgaaggat

SEQ ID NO: 272001 - DNA, 25 bp, Probe sequence
gatctaaacgtcaacttgtattaca

SEQ ID NO: 272002 - DNA, 25 bp, Probe sequence
gtatgcagagcaagtcactcaaggg

SEQ ID NO: 272003 - DNA, 25 bp, Probe sequence
gggtatttgatgaagaattagcgca

SEQ ID NO: 272004 - DNA, 25 bp, Probe sequence
ggtatgcagagcaagtcactcaagg

SEQ ID NO: 272005 - DNA, 25 bp, Probe sequence
ggatctaaacgtcaacttgtattac

SEQ ID NO: 272006 - DNA, 25 bp, Probe sequence
tggtatgcagagcaagtcactcaag

SEQ ID NO: 272007 - DNA, 25 bp, Probe sequence
tgaccttgagccctgcattgaagga

SEQ ID NO: 272008 - DNA, 25 bp, Probe sequence
tgaaccttcaccaaaactattaaca

SEQ ID NO: 272009 - DNA, 25 bp, Probe sequence
tccaaaggatctaaacgtcaacttg

SEQ ID NO: 272010 - DNA, 25 bp, Probe sequence
taatcctttaatgaaatggtatatc

SEQ ID NO: 272011 - DNA, 25 bp, Probe sequence
taacaacatggtatgcagagcaagt

SEQ ID NO: 272012 - DNA, 25 bp, Probe sequence
tatgcagagcaagtcactcaaggga

SEQ ID NO: 272013 - DNA, 25 bp, Probe sequence
tttgcagcatttttaaacacatata

SEQ ID NO: 272014 - DNA, 25 bp, Probe sequence
ttaaatgaaccttcaccaaaactat

SEQ ID NO: 272015 - DNA, 25 bp, Probe sequence
ttgaccttgagccctgcattgaagg

SEQ ID NO: 272016 - DNA, 25 bp, Probe sequence
attaagcatagaactgacaaaaaca

SEQ ID NO: 272017 - DNA, 25 bp, Probe sequence
atacaaacaaggctggtgcgagcaa

SEQ ID NO: 272018 - DNA, 25 bp, Probe sequence
atccattaagcatagaactgacaaa

SEQ ID NO: 272019 - DNA, 25 bp, Probe sequence
agagcatacaaacaaggctggtgcg

SEQ ID NO: 272020 - DNA, 25 bp, Probe sequence
agcaacgcggataaatttttcatga

SEQ ID NO: 272021 - DNA, 25 bp, Probe sequence
agcatacaaacaaggctggtgcgag

SEQ ID NO: 272022 - DNA, 25 bp, Probe sequence
acaaacaaggctggtgcgagcaata

SEQ ID NO: 272023 - DNA, 25 bp, Probe sequence
aaacgctagcaacgcggataaattt

SEQ ID NO: 272024 - DNA, 25 bp, Probe sequence
aaacaaggctggtgcgagcaatatt

SEQ ID NO: 272025 - DNA, 25 bp, Probe sequence
aacgctagcaacgcggataaatttt

SEQ ID NO: 272026 - DNA, 25 bp, Probe sequence
aacgcggataaatttttcatgaaag

SEQ ID NO: 272027 - DNA, 25 bp, Probe sequence
aagaatccattaagcatagaactga

SEQ ID NO: 272028 - DNA, 25 bp, Probe sequence
aatccattaagcatagaactgacaa

SEQ ID NO: 272029 - DNA, 25 bp, Probe sequence
caacgcggataaatttttcatgaaa

SEQ ID NO: 272030 - DNA, 25 bp, Probe sequence
caaacaaggctggtgcgagcaatat

SEQ ID NO: 272031 - DNA, 25 bp, Probe sequence
caaacgctagcaacgcggataaatt

SEQ ID NO: 272032 - DNA, 25 bp, Probe sequence
catacaaacaaggctggtgcgagca

SEQ ID NO: 272033 - DNA, 25 bp, Probe sequence
ctagcaacgcggataaatttttcat

SEQ ID NO: 272034 - DNA, 25 bp, Probe sequence
cgcggataaatttttcatgaaaggg

SEQ ID NO: 272035 - DNA, 25 bp, Probe sequence
cccaaacgctagcaacgcggataaa

SEQ ID NO: 272036 - DNA, 25 bp, Probe sequence
gcccaaacgctagcaacgcggataa

SEQ ID NO: 272037 - DNA, 25 bp, Probe sequence
ccaaacgctagcaacgcggataaat

SEQ ID NO: 272038 - DNA, 25 bp, Probe sequence
gctagcaacgcggataaatttttca

SEQ ID NO: 272039 - DNA, 25 bp, Probe sequence
gcatacaaacaaggctggtgcgagc

SEQ ID NO: 272040 - DNA, 25 bp, Probe sequence
gcaacgcggataaatttttcatgaa

SEQ ID NO: 272041 - DNA, 25 bp, Probe sequence
gaattttattgtcggttaagagatg

SEQ ID NO: 272042 - DNA, 25 bp, Probe sequence
gagcatacaaacaaggctggtgcga

SEQ ID NO: 272043 - DNA, 25 bp, Probe sequence
gatagagcatacaaacaaggctggt

SEQ ID NO: 272044 - DNA, 25 bp, Probe sequence
tgaattttattgtcggttaagagat

SEQ ID NO: 272045 - DNA, 25 bp, Probe sequence
tcatgaaagggggtctttatatgaa

SEQ ID NO: 272046 - DNA, 25 bp, Probe sequence
tacaaacaaggctggtgcgagcaat

SEQ ID NO: 272047 - DNA, 25 bp, Probe sequence
tagcaacgcggataaatttttcatg

SEQ ID NO: 272048 - DNA, 25 bp, Probe sequence
ttttcatgaaagggggtctttatat

SEQ ID NO: 272049 - DNA, 25 bp, Probe sequence
ttattgtcggttaagagatgaactt

SEQ ID NO: 272050 - DNA, 25 bp, Probe sequence
atttgggatgtactaagcgagtttg

SEQ ID NO: 272051 - DNA, 25 bp, Probe sequence
attgagaatagcgtttgctacagct

SEQ ID NO: 272052 - DNA, 25 bp, Probe sequence
atatttgggatgtactaagcgagtt

SEQ ID NO: 272053 - DNA, 25 bp, Probe sequence
ataccgcactaattcatattgttga

SEQ ID NO: 272054 - DNA, 25 bp, Probe sequence
atgagaacattgaagaatttgaaat

SEQ ID NO: 272055 - DNA, 25 bp, Probe sequence
atgtactaagcgagtttgacagtga

SEQ ID NO: 272056 - DNA, 25 bp, Probe sequence
accgcactaattcatattgttgaaa

SEQ ID NO: 272057 - DNA, 25 bp, Probe sequence
actaagcgagtttgacagtgaacaa

SEQ ID NO: 272058 - DNA, 25 bp, Probe sequence
aagcgagtttgacagtgaacaagag

SEQ ID NO: 272059 - DNA, 25 bp, Probe sequence
aataccgcactaattcatattgttg

SEQ ID NO: 272060 - DNA, 25 bp, Probe sequence
aattgagaatagcgtttgctacagc

SEQ ID NO: 272061 - DNA, 25 bp, Probe sequence
ctaagcgagtttgacagtgaacaag

SEQ ID NO: 272062 - DNA, 25 bp, Probe sequence
ctcaataccgcactaattcatattg

SEQ ID NO: 272063 - DNA, 25 bp, Probe sequence
ccgcactaattcatattgttgaaag

SEQ ID NO: 272064 - DNA, 25 bp, Probe sequence
gcgagtttgacagtgaacaagagga

SEQ ID NO: 272065 - DNA, 25 bp, Probe sequence
gcactaattcatattgttgaaagat

SEQ ID NO: 272066 - DNA, 25 bp, Probe sequence
gacagtgaacaagaggaagaaatac

SEQ ID NO: 272067 - DNA, 25 bp, Probe sequence
gagtttgacagtgaacaagaggaag

SEQ ID NO: 272068 - DNA, 25 bp, Probe sequence
gatgtactaagcgagtttgacagtg

SEQ ID NO: 272069 - DNA, 25 bp, Probe sequence
gattgaaattgagaatagcgtttgc

SEQ ID NO: 272070 - DNA, 25 bp, Probe sequence
gtactaagcgagtttgacagtgaac

SEQ ID NO: 272071 - DNA, 25 bp, Probe sequence
gggatgtactaagcgagtttgacag

SEQ ID NO: 272072 - DNA, 25 bp, Probe sequence
ggatgtactaagcgagtttgacagt

SEQ ID NO: 272073 - DNA, 25 bp, Probe sequence
tgggatgtactaagcgagtttgaca

SEQ ID NO: 272074 - DNA, 25 bp, Probe sequence
tgtactaagcgagtttgacagtgaa

SEQ ID NO: 272075 - DNA, 25 bp, Probe sequence
tgaaattgagaatagcgtttgctac

SEQ ID NO: 272076 - DNA, 25 bp, Probe sequence
tcaataccgcactaattcatattgt

SEQ ID NO: 272077 - DNA, 25 bp, Probe sequence
taagcgagtttgacagtgaacaaga

SEQ ID NO: 272078 - DNA, 25 bp, Probe sequence
tactaagcgagtttgacagtgaaca

SEQ ID NO: 272079 - DNA, 25 bp, Probe sequence
taccgcactaattcatattgttgaa

SEQ ID NO: 272080 - DNA, 25 bp, Probe sequence
tatttgggatgtactaagcgagttt

SEQ ID NO: 272081 - DNA, 25 bp, Probe sequence
tttgggatgtactaagcgagtttga

SEQ ID NO: 272082 - DNA, 25 bp, Probe sequence
ttgagaatagcgtttgctacagcta

SEQ ID NO: 272083 - DNA, 25 bp, Probe sequence
ttgggatgtactaagcgagtttgac

SEQ ID NO: 272084 - DNA, 25 bp, Probe sequence
attatttatgttgatgaagatttta

SEQ ID NO: 272085 - DNA, 25 bp, Probe sequence
atagctgtcataacaaaattcatgc

SEQ ID NO: 272086 - DNA, 25 bp, Probe sequence
ataatgacaaaagtaatcttaagaa

SEQ ID NO: 272087 - DNA, 25 bp, Probe sequence
atgataatgacaaaagtaatcttaa

SEQ ID NO: 272088 - DNA, 25 bp, Probe sequence
aatgataatgacaaaagtaatctta

SEQ ID NO: 272089 - DNA, 25 bp, Probe sequence
gataatgacaaaagtaatcttaaga

SEQ ID NO: 272090 - DNA, 25 bp, Probe sequence
tgataatgacaaaagtaatcttaag

SEQ ID NO: 272091 - DNA, 25 bp, Probe sequence
taatgacaaaagtaatcttaagaaa

SEQ ID NO: 272092 - DNA, 25 bp, Probe sequence
tagctgtcataacaaaattcatgca

SEQ ID NO: 272093 - DNA, 25 bp, Probe sequence
tatagctgtcataacaaaattcatg

SEQ ID NO: 272094 - DNA, 25 bp, Probe sequence
ttatagctgtcataacaaaattcat

SEQ ID NO: 272095 - DNA, 25 bp, Probe sequence
ttatttatgttgatgaagattttaa

SEQ ID NO: 272096 - DNA, 25 bp, Probe sequence
attgtttggtttggacttacatggt

SEQ ID NO: 272097 - DNA, 25 bp, Probe sequence
atcatctgaaagtgtctttagtctt

SEQ ID NO: 272098 - DNA, 25 bp, Probe sequence
atgaccgataacacaatagatcaaa

SEQ ID NO: 272099 - DNA, 25 bp, Probe sequence
agtggaaccatttaaatcatctgaa

SEQ ID NO: 272100 - DNA, 25 bp, Probe sequence
acagcatttagtgaattgcagttgt

SEQ ID NO: 272101 - DNA, 25 bp, Probe sequence
aaatgttagtcatagcacctaaaca

SEQ ID NO: 272102 - DNA, 25 bp, Probe sequence
aaacttacaacaaggtgggcacatt

SEQ ID NO: 272103 - DNA, 25 bp, Probe sequence
aaacaagttgctaaagatacatggg

SEQ ID NO: 272104 - DNA, 25 bp, Probe sequence
aaaatcatacgactattattcatca

SEQ ID NO: 272105 - DNA, 25 bp, Probe sequence
aacagtatcaacacttacagcattt

SEQ ID NO: 272106 - DNA, 25 bp, Probe sequence
aagaagaaggaacagttgtagctca

SEQ ID NO: 272107 - DNA, 25 bp, Probe sequence
aagacttgagtcttcattcagtcgt

SEQ ID NO: 272108 - DNA, 25 bp, Probe sequence
aatactaaatggttatgcgatcaat

SEQ ID NO: 272109 - DNA, 25 bp, Probe sequence
catgggttgatgaagttgataagtg

SEQ ID NO: 272110 - DNA, 25 bp, Probe sequence
gcttatagcacatccagcaagtgca

SEQ ID NO: 272111 - DNA, 25 bp, Probe sequence
gaattgcagttgttagacactaaaa

SEQ ID NO: 272112 - DNA, 25 bp, Probe sequence
gaatggccatttgatatggttgtaa

SEQ ID NO: 272113 - DNA, 25 bp, Probe sequence
gaactgtctacatttaaaagtccta

SEQ ID NO: 272114 - DNA, 25 bp, Probe sequence
gaaatacggtttgtttttagatatg

SEQ ID NO: 272115 - DNA, 25 bp, Probe sequence
gacaaggacaaaatcatacgactat

SEQ ID NO: 272116 - DNA, 25 bp, Probe sequence
gaaattaccactcattaatagattt

SEQ ID NO: 272117 - DNA, 25 bp, Probe sequence
gagtcttcattcagtcgttatcgag

SEQ ID NO: 272118 - DNA, 25 bp, Probe sequence
gaggctgatatctatgtaaccaata

SEQ ID NO: 272119 - DNA, 25 bp, Probe sequence
gatgcattaaacacagaggctgata

SEQ ID NO: 272120 - DNA, 25 bp, Probe sequence
gatatgcctgacagagttgatacta

SEQ ID NO: 272121 - DNA, 25 bp, Probe sequence
gtgtctttagtcttaggaacaccta

SEQ ID NO: 272122 - DNA, 25 bp, Probe sequence
gggagctaagagacggatctgaaga

SEQ ID NO: 272123 - DNA, 25 bp, Probe sequence
ggggctagggaaaacagtatcaaca

SEQ ID NO: 272124 - DNA, 25 bp, Probe sequence
ggtgggcacattattgtttggtttg

SEQ ID NO: 272125 - DNA, 25 bp, Probe sequence
ggatttatgggctcaagtttatttg

SEQ ID NO: 272126 - DNA, 25 bp, Probe sequence
tggaattataccaacaagcaaatgc

SEQ ID NO: 272127 - DNA, 25 bp, Probe sequence
tggttgtaattgatgaactgtctac

SEQ ID NO: 272128 - DNA, 25 bp, Probe sequence
tagaggagtctcaaggccaaccaat

SEQ ID NO: 272129 - DNA, 25 bp, Probe sequence
ttcaaaccacatagctatcaaaagt

SEQ ID NO: 272130 - DNA, 25 bp, Probe sequence
attctcatcataatacggatcccgt

SEQ ID NO: 272131 - DNA, 25 bp, Probe sequence
attcttatgctgctagtcgtttatc

SEQ ID NO: 272132 - DNA, 25 bp, Probe sequence
atcttaacacaccaattcctagcaa

SEQ ID NO: 272133 - DNA, 25 bp, Probe sequence
atgaatcgttcaatgctaacacttg

SEQ ID NO: 272134 - DNA, 25 bp, Probe sequence
aggtctgtgcgcttgaagtgtttgt

SEQ ID NO: 272135 - DNA, 25 bp, Probe sequence
aaagccgggaattgttggtgcattt

SEQ ID NO: 272136 - DNA, 25 bp, Probe sequence
aagactgcgtttagtgattccttta

SEQ ID NO: 272137 - DNA, 25 bp, Probe sequence
cagttttgatttagtacgcatacac

SEQ ID NO: 272138 - DNA, 25 bp, Probe sequence
ctactaaccgttatacctatcatga

SEQ ID NO: 272139 - DNA, 25 bp, Probe sequence
gactacctagttataaagcaatgca

SEQ ID NO: 272140 - DNA, 25 bp, Probe sequence
gcggtatgcttgtgaacagttttga

SEQ ID NO: 272141 - DNA, 25 bp, Probe sequence
gagttattccttaaccctgaactag

SEQ ID NO: 272142 - DNA, 25 bp, Probe sequence
gaatggccaacgtcttcaagggaag

SEQ ID NO: 272143 - DNA, 25 bp, Probe sequence
gaaggttcaactgcaggtggattgg

SEQ ID NO: 272144 - DNA, 25 bp, Probe sequence
gaagctattaagcatttcatatcta

SEQ ID NO: 272145 - DNA, 25 bp, Probe sequence
gaaacttttattcctgatttatacg

SEQ ID NO: 272146 - DNA, 25 bp, Probe sequence
gatcgtgatgtctcatattcttatg

SEQ ID NO: 272147 - DNA, 25 bp, Probe sequence
gatactccggttaatcgactaccta

SEQ ID NO: 272148 - DNA, 25 bp, Probe sequence
gatacaacttatcaaccacataggt

SEQ ID NO: 272149 - DNA, 25 bp, Probe sequence
gatatcgttggcatggattacttcg

SEQ ID NO: 272150 - DNA, 25 bp, Probe sequence
gattggactgacacattagaatggc

SEQ ID NO: 272151 - DNA, 25 bp, Probe sequence
gttggtgcattttgtagagcctata

SEQ ID NO: 272152 - DNA, 25 bp, Probe sequence
gtgctggtcaagtcatgaatcgttc

SEQ ID NO: 272153 - DNA, 25 bp, Probe sequence
ggtggtgcatggttttctgacagtt

SEQ ID NO: 272154 - DNA, 25 bp, Probe sequence
ggtgtaggtaaatctgctttgctaa

SEQ ID NO: 272155 - DNA, 25 bp, Probe sequence
ggttaatgtattggccttcaactag

SEQ ID NO: 272156 - DNA, 25 bp, Probe sequence
ggattacttcgatgatacaacttat

SEQ ID NO: 272157 - DNA, 25 bp, Probe sequence
ggaagacgtttttggccaatgactg

SEQ ID NO: 272158 - DNA, 25 bp, Probe sequence
ggcaagacggtgatgatagcagttt

SEQ ID NO: 272159 - DNA, 25 bp, Probe sequence
tacggatcccgtaagcggtatgctt

SEQ ID NO: 272160 - DNA, 25 bp, Probe sequence
tgctaacacttgatatcgattatgc

SEQ ID NO: 272161 - DNA, 25 bp, Probe sequence
taacaagtttgcctattctcatcat

SEQ ID NO: 272162 - DNA, 25 bp, Probe sequence
tatggcttggtctgactttatgcag

SEQ ID NO: 272163 - DNA, 25 bp, Probe sequence
tatgcttacactttatggtcctcaa

SEQ ID NO: 272164 - DNA, 25 bp, Probe sequence
attgatcttgttaagtagcatttct

SEQ ID NO: 272165 - DNA, 25 bp, Probe sequence
atatttttattgatcttgttaagta

SEQ ID NO: 272166 - DNA, 25 bp, Probe sequence
ataatggtgttgaaggtttagaaga

SEQ ID NO: 272167 - DNA, 25 bp, Probe sequence
atcttgttaagtagcatttctcata

SEQ ID NO: 272168 - DNA, 25 bp, Probe sequence
atggtgttgaaggtttagaagatta

SEQ ID NO: 272169 - DNA, 25 bp, Probe sequence
agcaatagcactggaggtgttgtaa

SEQ ID NO: 272170 - DNA, 25 bp, Probe sequence
accatagaagcattggagtatatga

SEQ ID NO: 272171 - DNA, 25 bp, Probe sequence
aaaccatagaagcattggagtatat

SEQ ID NO: 272172 - DNA, 25 bp, Probe sequence
aaaaccatagaagcattggagtata

SEQ ID NO: 272173 - DNA, 25 bp, Probe sequence
aagtagcatttctcataagatgaaa

SEQ ID NO: 272174 - DNA, 25 bp, Probe sequence
cttgttaagtagcatttctcataag

SEQ ID NO: 272175 - DNA, 25 bp, Probe sequence
cttatcttttcaagcagttagtaaa

SEQ ID NO: 272176 - DNA, 25 bp, Probe sequence
ctatatttttattgatcttgttaag

SEQ ID NO: 272177 - DNA, 25 bp, Probe sequence
gcatttctcataagatgaaaaccat

SEQ ID NO: 272178 - DNA, 25 bp, Probe sequence
gatcttgttaagtagcatttctcat

SEQ ID NO: 272179 - DNA, 25 bp, Probe sequence
gattatgaaaatgaagttgaacgaa

SEQ ID NO: 272180 - DNA, 25 bp, Probe sequence
gttaagtagcatttctcataagatg

SEQ ID NO: 272181 - DNA, 25 bp, Probe sequence
gtagcatttctcataagatgaaaac

SEQ ID NO: 272182 - DNA, 25 bp, Probe sequence
ggtgttgaaggtttagaagattatg

SEQ ID NO: 272183 - DNA, 25 bp, Probe sequence
tgttgaaggtttagaagattatgaa

SEQ ID NO: 272184 - DNA, 25 bp, Probe sequence
tgttaagtagcatttctcataagat

SEQ ID NO: 272185 - DNA, 25 bp, Probe sequence
tgatcttgttaagtagcatttctca

SEQ ID NO: 272186 - DNA, 25 bp, Probe sequence
tcttgttaagtagcatttctcataa

SEQ ID NO: 272187 - DNA, 25 bp, Probe sequence
taagtagcatttctcataagatgaa

SEQ ID NO: 272188 - DNA, 25 bp, Probe sequence
tagcaatagcactggaggtgttgta

SEQ ID NO: 272189 - DNA, 25 bp, Probe sequence
tatcttttcaagcagttagtaaaaa

SEQ ID NO: 272190 - DNA, 25 bp, Probe sequence
tatttttattgatcttgttaagtag

SEQ ID NO: 272191 - DNA, 25 bp, Probe sequence
tattgatcttgttaagtagcatttc

SEQ ID NO: 272192 - DNA, 25 bp, Probe sequence
tttattgatcttgttaagtagcatt

SEQ ID NO: 272193 - DNA, 25 bp, Probe sequence
tttttattgatcttgttaagtagca

SEQ ID NO: 272194 - DNA, 25 bp, Probe sequence
ttatcttttcaagcagttagtaaaa

SEQ ID NO: 272195 - DNA, 25 bp, Probe sequence
ttaagtagcatttctcataagatga

SEQ ID NO: 272196 - DNA, 25 bp, Probe sequence
ttgatcttgttaagtagcatttctc

SEQ ID NO: 272197 - DNA, 25 bp, Probe sequence
ttgttaagtagcatttctcataaga

SEQ ID NO: 272198 - DNA, 25 bp, Probe sequence
atatatctccagaacttcttagata

SEQ ID NO: 272199 - DNA, 25 bp, Probe sequence
atatcatatatctccagaacttctt

SEQ ID NO: 272200 - DNA, 25 bp, Probe sequence
ataccaacgaaatgtgagagcggaa

SEQ ID NO: 272201 - DNA, 25 bp, Probe sequence
atcatatatctccagaacttcttag

SEQ ID NO: 272202 - DNA, 25 bp, Probe sequence
atccgtactggttcgatgtcactta

SEQ ID NO: 272203 - DNA, 25 bp, Probe sequence
atgcgcggcgatgaattattgtgtg

SEQ ID NO: 272204 - DNA, 25 bp, Probe sequence
acgaaatgtgagagcggaatatgaa

SEQ ID NO: 272205 - DNA, 25 bp, Probe sequence
actggttcgatgtcacttataacca

SEQ ID NO: 272206 - DNA, 25 bp, Probe sequence
acaaacataaaatgcgcggcgatga

SEQ ID NO: 272207 - DNA, 25 bp, Probe sequence
aaatatcatatatctccagaacttc

SEQ ID NO: 272208 - DNA, 25 bp, Probe sequence
aaatgcgcggcgatgaattattgtg

SEQ ID NO: 272209 - DNA, 25 bp, Probe sequence
aaccaaatgttcaagaaatggagtg

SEQ ID NO: 272210 - DNA, 25 bp, Probe sequence
aatgcgcggcgatgaattattgtgt

SEQ ID NO: 272211 - DNA, 25 bp, Probe sequence
caacgaaatgtgagagcggaatatg

SEQ ID NO: 272212 - DNA, 25 bp, Probe sequence
catatatctccagaacttcttagat

SEQ ID NO: 272213 - DNA, 25 bp, Probe sequence
ctggttcgatgtcacttataaccaa

SEQ ID NO: 272214 - DNA, 25 bp, Probe sequence
cgtactggttcgatgtcacttataa

SEQ ID NO: 272215 - DNA, 25 bp, Probe sequence
ccgtactggttcgatgtcacttata

SEQ ID NO: 272216 - DNA, 25 bp, Probe sequence
gcgcggcgatgaattattgtgtgga

SEQ ID NO: 272217 - DNA, 25 bp, Probe sequence
gcggcgatgaattattgtgtggaag

SEQ ID NO: 272218 - DNA, 25 bp, Probe sequence
gaagaaaagttataagagtgcgtat

SEQ ID NO: 272219 - DNA, 25 bp, Probe sequence
gaaaaatatcatatatctccagaac

SEQ ID NO: 272220 - DNA, 25 bp, Probe sequence
gaccatggctttatgatggaacgcc

SEQ ID NO: 272221 - DNA, 25 bp, Probe sequence
gatggctagaagaaaagttataaga

SEQ ID NO: 272222 - DNA, 25 bp, Probe sequence
gatacaaacataaaatgcgcggcga

SEQ ID NO: 272223 - DNA, 25 bp, Probe sequence
gttcgatgtcacttataaccaaatg

SEQ ID NO: 272224 - DNA, 25 bp, Probe sequence
gtactggttcgatgtcacttataac

SEQ ID NO: 272225 - DNA, 25 bp, Probe sequence
ggcgatgaattattgtgtggaagaa

SEQ ID NO: 272226 - DNA, 25 bp, Probe sequence
tgatccgtactggttcgatgtcact

SEQ ID NO: 272227 - DNA, 25 bp, Probe sequence
tgcgcggcgatgaattattgtgtgg

SEQ ID NO: 272228 - DNA, 25 bp, Probe sequence
tccgtactggttcgatgtcacttat

SEQ ID NO: 272229 - DNA, 25 bp, Probe sequence
tcatatatctccagaacttcttaga

SEQ ID NO: 272230 - DNA, 25 bp, Probe sequence
tactggttcgatgtcacttataacc

SEQ ID NO: 272231 - DNA, 25 bp, Probe sequence
tatcatatatctccagaacttctta

SEQ ID NO: 272232 - DNA, 25 bp, Probe sequence
atttatttaataatccaggtgaact

SEQ ID NO: 272233 - DNA, 25 bp, Probe sequence
atatcaatgcttctgttgacattag

SEQ ID NO: 272234 - DNA, 25 bp, Probe sequence
atcaatgcttctgttgacattagaa

SEQ ID NO: 272235 - DNA, 25 bp, Probe sequence
atcaagcttatatcaatgcttctgt

SEQ ID NO: 272236 - DNA, 25 bp, Probe sequence
atgcttctgttgacattagaattcc

SEQ ID NO: 272237 - DNA, 25 bp, Probe sequence
atgcaacatcaagcttatatcaatg

SEQ ID NO: 272238 - DNA, 25 bp, Probe sequence
aggttttagatttagaggtggaatg

SEQ ID NO: 272239 - DNA, 25 bp, Probe sequence
agcttatatcaatgcttctgttgac

SEQ ID NO: 272240 - DNA, 25 bp, Probe sequence
acatcaagcttatatcaatgcttct

SEQ ID NO: 272241 - DNA, 25 bp, Probe sequence
aagtgttaattacaatcagattgat

SEQ ID NO: 272242 - DNA, 25 bp, Probe sequence
aatccaggtgaactattaaaatata

SEQ ID NO: 272243 - DNA, 25 bp, Probe sequence
aattcctacagaagtcgaaagtgtt

SEQ ID NO: 272244 - DNA, 25 bp, Probe sequence
caatgcttctgttgacattagaatt

SEQ ID NO: 272245 - DNA, 25 bp, Probe sequence
caagcttatatcaatgcttctgttg

SEQ ID NO: 272246 - DNA, 25 bp, Probe sequence
cattagaattcctacagaagtcgaa

SEQ ID NO: 272247 - DNA, 25 bp, Probe sequence
cttatatcaatgcttctgttgacat

SEQ ID NO: 272248 - DNA, 25 bp, Probe sequence
gcggactatttatttaataatccag

SEQ ID NO: 272249 - DNA, 25 bp, Probe sequence
gcttatatcaatgcttctgttgaca

SEQ ID NO: 272250 - DNA, 25 bp, Probe sequence
gcttctgttgacattagaattccta

SEQ ID NO: 272251 - DNA, 25 bp, Probe sequence
gcaacatcaagcttatatcaatgct

SEQ ID NO: 272252 - DNA, 25 bp, Probe sequence
gaattcctacagaagtcgaaagtgt

SEQ ID NO: 272253 - DNA, 25 bp, Probe sequence
gaagtcgaaagtgttaattacaatc

SEQ ID NO: 272254 - DNA, 25 bp, Probe sequence
gacattagaattcctacagaagtcg

SEQ ID NO: 272255 - DNA, 25 bp, Probe sequence
gttgacattagaattcctacagaag

SEQ ID NO: 272256 - DNA, 25 bp, Probe sequence
gtcgaaagtgttaattacaatcaga

SEQ ID NO: 272257 - DNA, 25 bp, Probe sequence
tggcggactatttatttaataatcc

SEQ ID NO: 272258 - DNA, 25 bp, Probe sequence
tgttgacattagaattcctacagaa

SEQ ID NO: 272259 - DNA, 25 bp, Probe sequence
tatcaatgcttctgttgacattaga

SEQ ID NO: 272260 - DNA, 25 bp, Probe sequence
tatatcaatgcttctgttgacatta

SEQ ID NO: 272261 - DNA, 25 bp, Probe sequence
ttagaattcctacagaagtcgaaag

SEQ ID NO: 272262 - DNA, 25 bp, Probe sequence
tttggcggactatttatttaataat

SEQ ID NO: 272263 - DNA, 25 bp, Probe sequence
ttatttaataatccaggtgaactat

SEQ ID NO: 272264 - DNA, 25 bp, Probe sequence
ttcctacagaagtcgaaagtgttaa

SEQ ID NO: 272265 - DNA, 25 bp, Probe sequence
ttctgttgacattagaattcctaca

SEQ ID NO: 272266 - DNA, 25 bp, Probe sequence
atgcattcaatgctaatttcgaaag

SEQ ID NO: 272267 - DNA, 25 bp, Probe sequence
agtaagtgatttttctgcaatagag

SEQ ID NO: 272268 - DNA, 25 bp, Probe sequence
agataatgagcctttccacgctgat

SEQ ID NO: 272269 - DNA, 25 bp, Probe sequence
agaggtgtacaacttcagaatttaa

SEQ ID NO: 272270 - DNA, 25 bp, Probe sequence
acgtatggtgggaagttagtcgaga

SEQ ID NO: 272271 - DNA, 25 bp, Probe sequence
aaagcataactaaaggcgaccctct

SEQ ID NO: 272272 - DNA, 25 bp, Probe sequence
ctaaaggcgaccctctcagacaaaa

SEQ ID NO: 272273 - DNA, 25 bp, Probe sequence
aagactttccagtaactgcaattga

SEQ ID NO: 272274 - DNA, 25 bp, Probe sequence
aagaacttgtcttgctaaacatttt

SEQ ID NO: 272275 - DNA, 25 bp, Probe sequence
aattcgttatttctctataccttgt

SEQ ID NO: 272276 - DNA, 25 bp, Probe sequence
caatgcgtattggcttacctgcttc

SEQ ID NO: 272277 - DNA, 25 bp, Probe sequence
caatgttcatcctcaagacttatta

SEQ ID NO: 272278 - DNA, 25 bp, Probe sequence
catagttaatttttggaaggcttgc

SEQ ID NO: 272279 - DNA, 25 bp, Probe sequence
gcttacctgcttcgcttgataaagt

SEQ ID NO: 272280 - DNA, 25 bp, Probe sequence
gaatattgttcaagcaactgcaagg

SEQ ID NO: 272281 - DNA, 25 bp, Probe sequence
gaaggcttgccaagaggctgcaatt

SEQ ID NO: 272282 - DNA, 25 bp, Probe sequence
gaaaagtgtccgaattagctttagg

SEQ ID NO: 272283 - DNA, 25 bp, Probe sequence
gagcgattagtgcgattgacatgac

SEQ ID NO: 272284 - DNA, 25 bp, Probe sequence
gaggtattaagctttctaaatcatt

SEQ ID NO: 272285 - DNA, 25 bp, Probe sequence
gatgttaggagctaatgtgctcgat

SEQ ID NO: 272286 - DNA, 25 bp, Probe sequence
gatgccacctgaagaatggatttgc

SEQ ID NO: 272287 - DNA, 25 bp, Probe sequence
gatatttcgaaatgtggtgcctata

SEQ ID NO: 272288 - DNA, 25 bp, Probe sequence
gatttattactcaatgttcatcctc

SEQ ID NO: 272289 - DNA, 25 bp, Probe sequence
gttaggacgacatttactgctgaag

SEQ ID NO: 272290 - DNA, 25 bp, Probe sequence
tacggtgccggtactggaagatggg

SEQ ID NO: 272291 - DNA, 25 bp, Probe sequence
gggatttacttgcgatttctatagc

SEQ ID NO: 272292 - DNA, 25 bp, Probe sequence
ggtttagttgatagttggcgtaacg

SEQ ID NO: 272293 - DNA, 25 bp, Probe sequence
ggaagatgggcaggtagaggtgtac

SEQ ID NO: 272294 - DNA, 25 bp, Probe sequence
tggcgtaacgcaaatcctaacatag

SEQ ID NO: 272295 - DNA, 25 bp, Probe sequence
tgcctagtggaagagctttagctta

SEQ ID NO: 272296 - DNA, 25 bp, Probe sequence
tagaaaatcctaatagtcctacaca

SEQ ID NO: 272297 - DNA, 25 bp, Probe sequence
tagaggcaagagtcatagcatggta

SEQ ID NO: 272298 - DNA, 25 bp, Probe sequence
tatcaaggtggcgctggagctttaa

SEQ ID NO: 272299 - DNA, 25 bp, Probe sequence
tttacttctccgttttatatgaagg

SEQ ID NO: 272300 - DNA, 25 bp, Probe sequence
acctcttggcggtgcaagtgcagca

SEQ ID NO: 272301 - DNA, 25 bp, Probe sequence
attagacactgatgatgaggatttc

SEQ ID NO: 272302 - DNA, 25 bp, Probe sequence
atcaagcaaacaagcacctggtatt

SEQ ID NO: 272303 - DNA, 25 bp, Probe sequence
acgcatcaagcaaacaagcacctgg

SEQ ID NO: 272304 - DNA, 25 bp, Probe sequence
aacaagctatagaagctgctaaaga

SEQ ID NO: 272305 - DNA, 25 bp, Probe sequence
aacctcttggcggtgcaagtgcagc

SEQ ID NO: 272306 - DNA, 25 bp, Probe sequence
aacgcatcaagcaaacaagcacctg

SEQ ID NO: 272307 - DNA, 25 bp, Probe sequence
aagtttggaggcaaagttcctgcaa

SEQ ID NO: 272308 - DNA, 25 bp, Probe sequence
caggaaaagtaagagcatcatatgc

SEQ ID NO: 272309 - DNA, 25 bp, Probe sequence
catcaagcaaacaagcacctggtat

SEQ ID NO: 272310 - DNA, 25 bp, Probe sequence
cttggcggtgcaagtgcagcagaag

SEQ ID NO: 272311 - DNA, 25 bp, Probe sequence
ctcttggcggtgcaagtgcagcaga

SEQ ID NO: 272312 - DNA, 25 bp, Probe sequence
cgaacctcttggcggtgcaagtgca

SEQ ID NO: 272313 - DNA, 25 bp, Probe sequence
cggtgcaagtgcagcagaagatgat

SEQ ID NO: 272314 - DNA, 25 bp, Probe sequence
cgcatcaagcaaacaagcacctggt

SEQ ID NO: 272315 - DNA, 25 bp, Probe sequence
cctcttggcggtgcaagtgcagcag

SEQ ID NO: 272316 - DNA, 25 bp, Probe sequence
gcatcaagcaaacaagcacctggta

SEQ ID NO: 272317 - DNA, 25 bp, Probe sequence
gcagttggattgaacaacattcaac

SEQ ID NO: 272318 - DNA, 25 bp, Probe sequence
gaacctcttggcggtgcaagtgcag

SEQ ID NO: 272319 - DNA, 25 bp, Probe sequence
gaacaacattcaacttgtagaaaaa

SEQ ID NO: 272320 - DNA, 25 bp, Probe sequence
gaaaaaggcgaacctcttggcggtg

SEQ ID NO: 272321 - DNA, 25 bp, Probe sequence
gatgaattagacactgatgatgagg

SEQ ID NO: 272322 - DNA, 25 bp, Probe sequence
gattgaacaacattcaacttgtaga

SEQ ID NO: 272323 - DNA, 25 bp, Probe sequence
gttggattgaacaacattcaacttg

SEQ ID NO: 272324 - DNA, 25 bp, Probe sequence
gtttggaggcaaagttcctgcaaat

SEQ ID NO: 272325 - DNA, 25 bp, Probe sequence
gtagaaaaaggcgaacctcttggcg

SEQ ID NO: 272326 - DNA, 25 bp, Probe sequence
gtaagtttggaggcaaagttcctgc

SEQ ID NO: 272327 - DNA, 25 bp, Probe sequence
gtgcaagtgcagcagaagatgattt

SEQ ID NO: 272328 - DNA, 25 bp, Probe sequence
ggcggtgcaagtgcagcagaagatg

SEQ ID NO: 272329 - DNA, 25 bp, Probe sequence
tcttggcggtgcaagtgcagcagaa

SEQ ID NO: 272330 - DNA, 25 bp, Probe sequence
tagaaaaaggcgaacctcttggcgg

SEQ ID NO: 272331 - DNA, 25 bp, Probe sequence
ttaacgcatcaagcaaacaagcacc

SEQ ID NO: 272332 - DNA, 25 bp, Probe sequence
ttgaacaagctatagaagctgctaa

SEQ ID NO: 272333 - DNA, 25 bp, Probe sequence
ttggcggtgcaagtgcagcagaaga

SEQ ID NO: 272334 - DNA, 25 bp, Probe sequence
atatcaacatattaagcctttgggc

SEQ ID NO: 272335 - DNA, 25 bp, Probe sequence
ggtttgtacaggtgcggagtcgttt

SEQ ID NO: 272336 - DNA, 25 bp, Probe sequence
aggtgcggagtcgtttattgctggt

SEQ ID NO: 272337 - DNA, 25 bp, Probe sequence
ctatcccggcattgccagtcgggga

SEQ ID NO: 272338 - DNA, 25 bp, Probe sequence
accatgaagatggattcgcagttct

SEQ ID NO: 272339 - DNA, 25 bp, Probe sequence
caagtgatgaaggctggcgctctcg

SEQ ID NO: 272340 - DNA, 25 bp, Probe sequence
cggattcatctatgggaggcaagtg

SEQ ID NO: 272341 - DNA, 25 bp, Probe sequence
cggcattgccagtcggggatattaa

SEQ ID NO: 272342 - DNA, 25 bp, Probe sequence
gctctcgtagtaatgattcaccggt

SEQ ID NO: 272343 - DNA, 25 bp, Probe sequence
gcattttgcaccccaatacatcatt

SEQ ID NO: 272344 - DNA, 25 bp, Probe sequence
gacaacaatttgattagcttttttc

SEQ ID NO: 272345 - DNA, 25 bp, Probe sequence
gactttgcagtaattgatcccgaca

SEQ ID NO: 272346 - DNA, 25 bp, Probe sequence
gagaatgttacagtctatcccggca

SEQ ID NO: 272347 - DNA, 25 bp, Probe sequence
gaggttcggattcatctatgggagg

SEQ ID NO: 272348 - DNA, 25 bp, Probe sequence
gaggcaagtgatgaaggctggcgct

SEQ ID NO: 272349 - DNA, 25 bp, Probe sequence
gatggattcgcagttctaatgtgta

SEQ ID NO: 272350 - DNA, 25 bp, Probe sequence
gatcagtggtgggatgaacgagact

SEQ ID NO: 272351 - DNA, 25 bp, Probe sequence
gatcccgacaacaatttgattagct

SEQ ID NO: 272352 - DNA, 25 bp, Probe sequence
gattcaccggtttgtacaggtgcgg

SEQ ID NO: 272353 - DNA, 25 bp, Probe sequence
gttgccgcattgaagtagagggaat

SEQ ID NO: 272354 - DNA, 25 bp, Probe sequence
gttctaatgtgtaatgaggttcgga

SEQ ID NO: 272355 - DNA, 25 bp, Probe sequence
gtttcactttggttcaccatgaaga

SEQ ID NO: 272356 - DNA, 25 bp, Probe sequence
gtaatgattcaccggtttgtacagg

SEQ ID NO: 272357 - DNA, 25 bp, Probe sequence
ggtgggatgaacgagactttgcagt

SEQ ID NO: 272358 - DNA, 25 bp, Probe sequence
ggtactgctagttgccgcattgaag

SEQ ID NO: 272359 - DNA, 25 bp, Probe sequence
ggagtcgtttattgctggtactgct

SEQ ID NO: 272360 - DNA, 25 bp, Probe sequence
ggcgctctcgtagtaatgattcacc

SEQ ID NO: 272361 - DNA, 25 bp, Probe sequence
tgattagcttttttcaacaaataaa

SEQ ID NO: 272362 - DNA, 25 bp, Probe sequence
tattgctggtactgctagttgccgc

SEQ ID NO: 272363 - DNA, 25 bp, Probe sequence
taagcctttgggcattttgcacccc

SEQ ID NO: 272364 - DNA, 25 bp, Probe sequence
taggtttcactttggttcaccatga

SEQ ID NO: 272365 - DNA, 25 bp, Probe sequence
tttgcaccccaatacatcattaaaa

SEQ ID NO: 272366 - DNA, 25 bp, Probe sequence
ttgctggtactgctagttgccgcat

SEQ ID NO: 272367 - DNA, 25 bp, Probe sequence
ttgcagtaattgatcccgacaacaa

SEQ ID NO: 272368 - DNA, 25 bp, Probe sequence
attatattttcaggtggtgtacttg

SEQ ID NO: 272369 - DNA, 25 bp, Probe sequence
atgacattcatacagttcgcatgac

SEQ ID NO: 272370 - DNA, 25 bp, Probe sequence
atggcttgggcgcatatgaactgct

SEQ ID NO: 272371 - DNA, 25 bp, Probe sequence
aggtagtcattgtagattctgtaag

SEQ ID NO: 272372 - DNA, 25 bp, Probe sequence
agatcactcaaatagagctcatgca

SEQ ID NO: 272373 - DNA, 25 bp, Probe sequence
accaagttacttagcattacgaatt

SEQ ID NO: 272374 - DNA, 25 bp, Probe sequence
acgaccagctataaagcaatctgct

SEQ ID NO: 272375 - DNA, 25 bp, Probe sequence
acggtaaaggcattgaagtttcagc

SEQ ID NO: 272376 - DNA, 25 bp, Probe sequence
actggtgatgtcattatattttcag

SEQ ID NO: 272377 - DNA, 25 bp, Probe sequence
aacttagattatatggcttgggcgc

SEQ ID NO: 272378 - DNA, 25 bp, Probe sequence
aagtgagttatatttcagtcttaaa

SEQ ID NO: 272379 - DNA, 25 bp, Probe sequence
cagttcgcatgactatcatacaacc

SEQ ID NO: 272380 - DNA, 25 bp, Probe sequence
cagtttttgctgaagaaggtacatt

SEQ ID NO: 272381 - DNA, 25 bp, Probe sequence
gtaaattaacacttgctaccgagtc

SEQ ID NO: 272382 - DNA, 25 bp, Probe sequence
gctatagataatcctcaacttagat

SEQ ID NO: 272383 - DNA, 25 bp, Probe sequence
gcattcatgtagaacacgtgcagaa

SEQ ID NO: 272384 - DNA, 25 bp, Probe sequence
gcagataaaagttcagtttttgctg

SEQ ID NO: 272385 - DNA, 25 bp, Probe sequence
gaatagataacttttctactgaaga

SEQ ID NO: 272386 - DNA, 25 bp, Probe sequence
gaaggcctaacacagtttgagttta

SEQ ID NO: 272387 - DNA, 25 bp, Probe sequence
gaaggtgagtttaaagcaggtagtc

SEQ ID NO: 272388 - DNA, 25 bp, Probe sequence
gaagtttcagctatagataatcctc

SEQ ID NO: 272389 - DNA, 25 bp, Probe sequence
gaagatattacagaaaccaagttac

SEQ ID NO: 272390 - DNA, 25 bp, Probe sequence
gacttgcttataacggtgaaggtga

SEQ ID NO: 272391 - DNA, 25 bp, Probe sequence
gagctcatgcaaagcttagtgcaag

SEQ ID NO: 272392 - DNA, 25 bp, Probe sequence
gagatgacgatgtaatagctttatt

SEQ ID NO: 272393 - DNA, 25 bp, Probe sequence
gattctgtaagataaagcattcatg

SEQ ID NO: 272394 - DNA, 25 bp, Probe sequence
gttgaagcgggttataaacctgaag

SEQ ID NO: 272395 - DNA, 25 bp, Probe sequence
gtaaatacgtccctgaatcttttgg

SEQ ID NO: 272396 - DNA, 25 bp, Probe sequence
gtgtacttgaaattattgaccttaa

SEQ ID NO: 272397 - DNA, 25 bp, Probe sequence
gggcgcatatgaactgcttagttta

SEQ ID NO: 272398 - DNA, 25 bp, Probe sequence
tcagtcttaaatatgaaggcctaac

SEQ ID NO: 272399 - DNA, 25 bp, Probe sequence
tacttcaatggggaaccgattttgt

SEQ ID NO: 272400 - DNA, 25 bp, Probe sequence
ttatataaactgcctgatatcaaaa

SEQ ID NO: 272401 - DNA, 25 bp, Probe sequence
ttagccagacttgcttataacggtg

SEQ ID NO: 272402 - DNA, 25 bp, Probe sequence
attatgttttatcagtaggaaaaga

SEQ ID NO: 272403 - DNA, 25 bp, Probe sequence
agagttccttaaaaaagcagacact

SEQ ID NO: 272404 - DNA, 25 bp, Probe sequence
agattatgttttatcagtaggaaaa

SEQ ID NO: 272405 - DNA, 25 bp, Probe sequence
agagaaagttaaagaagcaccaatg

SEQ ID NO: 272406 - DNA, 25 bp, Probe sequence
agcagacacttctgataagaaagaa

SEQ ID NO: 272407 - DNA, 25 bp, Probe sequence
actgaactatcaactgtagattcat

SEQ ID NO: 272408 - DNA, 25 bp, Probe sequence
actaaagattatgttttatcagtag

SEQ ID NO: 272409 - DNA, 25 bp, Probe sequence
aaagattatgttttatcagtaggaa

SEQ ID NO: 272410 - DNA, 25 bp, Probe sequence
aaagcagacacttctgataagaaag

SEQ ID NO: 272411 - DNA, 25 bp, Probe sequence
aaaaagcagacacttctgataagaa

SEQ ID NO: 272412 - DNA, 25 bp, Probe sequence
aaaaaagcagacacttctgataaga

SEQ ID NO: 272413 - DNA, 25 bp, Probe sequence
aaaagcagacacttctgataagaaa

SEQ ID NO: 272414 - DNA, 25 bp, Probe sequence
aactatcaactgtagattcatcaat

SEQ ID NO: 272415 - DNA, 25 bp, Probe sequence
aagcagacacttctgataagaaaga

SEQ ID NO: 272416 - DNA, 25 bp, Probe sequence
aagagaaagttaaagaagcaccaat

SEQ ID NO: 272417 - DNA, 25 bp, Probe sequence
aagattatgttttatcagtaggaaa

SEQ ID NO: 272418 - DNA, 25 bp, Probe sequence
cagacacttctgataagaaagaatt

SEQ ID NO: 272419 - DNA, 25 bp, Probe sequence
cttaaaaaagcagacacttctgata

SEQ ID NO: 272420 - DNA, 25 bp, Probe sequence
ctaaagattatgttttatcagtagg

SEQ ID NO: 272421 - DNA, 25 bp, Probe sequence
ctgaactatcaactgtagattcatc

SEQ ID NO: 272422 - DNA, 25 bp, Probe sequence
ccttaaaaaagcagacacttctgat

SEQ ID NO: 272423 - DNA, 25 bp, Probe sequence
gcagacacttctgataagaaagaat

SEQ ID NO: 272424 - DNA, 25 bp, Probe sequence
gaactatcaactgtagattcatcaa

SEQ ID NO: 272425 - DNA, 25 bp, Probe sequence
gacacttctgataagaaagaattta

SEQ ID NO: 272426 - DNA, 25 bp, Probe sequence
gagttccttaaaaaagcagacactt

SEQ ID NO: 272427 - DNA, 25 bp, Probe sequence
gttccttaaaaaagcagacacttct

SEQ ID NO: 272428 - DNA, 25 bp, Probe sequence
gattatgttttatcagtaggaaaag

SEQ ID NO: 272429 - DNA, 25 bp, Probe sequence
tgttttatcagtaggaaaagagttc

SEQ ID NO: 272430 - DNA, 25 bp, Probe sequence
tgaactatcaactgtagattcatca

SEQ ID NO: 272431 - DNA, 25 bp, Probe sequence
tccttaaaaaagcagacacttctga

SEQ ID NO: 272432 - DNA, 25 bp, Probe sequence
taaaaaagcagacacttctgataag

SEQ ID NO: 272433 - DNA, 25 bp, Probe sequence
taaagattatgttttatcagtagga

SEQ ID NO: 272434 - DNA, 25 bp, Probe sequence
ttaaaaaagcagacacttctgataa

SEQ ID NO: 272435 - DNA, 25 bp, Probe sequence
ttccttaaaaaagcagacacttctg

SEQ ID NO: 272436 - DNA, 25 bp, Probe sequence
atatacacctccttaggtggataac

SEQ ID NO: 272437 - DNA, 25 bp, Probe sequence
atacacctccttaggtggataacta

SEQ ID NO: 272438 - DNA, 25 bp, Probe sequence
ataatatacacctccttaggtggat

SEQ ID NO: 272439 - DNA, 25 bp, Probe sequence
aggagtgatagagatgccaaaaatc

SEQ ID NO: 272440 - DNA, 25 bp, Probe sequence
aggtggataactaaattatacacga

SEQ ID NO: 272441 - DNA, 25 bp, Probe sequence
agtgatagagatgccaaaaatcata

SEQ ID NO: 272442 - DNA, 25 bp, Probe sequence
agtttttcataatatacacctcctt

SEQ ID NO: 272443 - DNA, 25 bp, Probe sequence
agagtatttgatcagaaagcataaa

SEQ ID NO: 272444 - DNA, 25 bp, Probe sequence
agaaaatttatacattgattattca

SEQ ID NO: 272445 - DNA, 25 bp, Probe sequence
cacctccttaggtggataactaaat

SEQ ID NO: 272446 - DNA, 25 bp, Probe sequence
acgaaaggagtgatagagatgccaa

SEQ ID NO: 272447 - DNA, 25 bp, Probe sequence
aaaggagtgatagagatgccaaaaa

SEQ ID NO: 272448 - DNA, 25 bp, Probe sequence
aagagtatttgatcagaaagcataa

SEQ ID NO: 272449 - DNA, 25 bp, Probe sequence
aaggagtgatagagatgccaaaaat

SEQ ID NO: 272450 - DNA, 25 bp, Probe sequence
aatatacacctccttaggtggataa

SEQ ID NO: 272451 - DNA, 25 bp, Probe sequence
cataatatacacctccttaggtgga

SEQ ID NO: 272452 - DNA, 25 bp, Probe sequence
ctccttaggtggataactaaattat

SEQ ID NO: 272453 - DNA, 25 bp, Probe sequence
cgaaaggagtgatagagatgccaaa

SEQ ID NO: 272454 - DNA, 25 bp, Probe sequence
gaagagtatttgatcagaaagcata

SEQ ID NO: 272455 - DNA, 25 bp, Probe sequence
gaaaggagtgatagagatgccaaaa

SEQ ID NO: 272456 - DNA, 25 bp, Probe sequence
gagtatttgatcagaaagcataaaa

SEQ ID NO: 272457 - DNA, 25 bp, Probe sequence
gagtgatagagatgccaaaaatcat

SEQ ID NO: 272458 - DNA, 25 bp, Probe sequence
gtttttcataatatacacctcctta

SEQ ID NO: 272459 - DNA, 25 bp, Probe sequence
gtggataactaaattatacacgaaa

SEQ ID NO: 272460 - DNA, 25 bp, Probe sequence
ggtggataactaaattatacacgaa

SEQ ID NO: 272461 - DNA, 25 bp, Probe sequence
ggataactaaattatacacgaaagg

SEQ ID NO: 272462 - DNA, 25 bp, Probe sequence
tcataatatacacctccttaggtgg

SEQ ID NO: 272463 - DNA, 25 bp, Probe sequence
taatatacacctccttaggtggata

SEQ ID NO: 272464 - DNA, 25 bp, Probe sequence
tacacctccttaggtggataactaa

SEQ ID NO: 272465 - DNA, 25 bp, Probe sequence
tatacacctccttaggtggataact

SEQ ID NO: 272466 - DNA, 25 bp, Probe sequence
ttcataatatacacctccttaggtg

SEQ ID NO: 272467 - DNA, 25 bp, Probe sequence
tttcataatatacacctccttaggt

SEQ ID NO: 272468 - DNA, 25 bp, Probe sequence
tttttcataatatacacctccttag

SEQ ID NO: 272469 - DNA, 25 bp, Probe sequence
ttttcataatatacacctccttagg

SEQ ID NO: 272470 - DNA, 25 bp, Probe sequence
attggcaaccttcagccgatgacct

SEQ ID NO: 272471 - DNA, 25 bp, Probe sequence
atagttttttacaatgcatcatttc

SEQ ID NO: 272472 - DNA, 25 bp, Probe sequence
atagcgatgggacaaaccttatcag

SEQ ID NO: 272473 - DNA, 25 bp, Probe sequence
atcttgtctctatgacacggaaaga

SEQ ID NO: 272474 - DNA, 25 bp, Probe sequence
agagaccaggaattattgaagcaat

SEQ ID NO: 272475 - DNA, 25 bp, Probe sequence
agcgatgggacaaaccttatcagat

SEQ ID NO: 272476 - DNA, 25 bp, Probe sequence
accttatcagatattggcaaccttc

SEQ ID NO: 272477 - DNA, 25 bp, Probe sequence
aaatcttgtctctatgacacggaaa

SEQ ID NO: 272478 - DNA, 25 bp, Probe sequence
aaaaatcttgtctctatgacacgga

SEQ ID NO: 272479 - DNA, 25 bp, Probe sequence
aacccaactagagaccaggaattat

SEQ ID NO: 272480 - DNA, 25 bp, Probe sequence
cagccgatgacctcatggcaaatga

SEQ ID NO: 272481 - DNA, 25 bp, Probe sequence
cttcagccgatgacctcatggcaaa

SEQ ID NO: 272482 - DNA, 25 bp, Probe sequence
cgaactaagatattaccaacaaatg

SEQ ID NO: 272483 - DNA, 25 bp, Probe sequence
gccgatgacctcatggcaaatgatt

SEQ ID NO: 272484 - DNA, 25 bp, Probe sequence
gcatcatttcaaatagcgatgggac

SEQ ID NO: 272485 - DNA, 25 bp, Probe sequence
gacctcatggcaaatgattgggaag

SEQ ID NO: 272486 - DNA, 25 bp, Probe sequence
gatgggacaaaccttatcagatatt

SEQ ID NO: 272487 - DNA, 25 bp, Probe sequence
gatgacctcatggcaaatgattggg

SEQ ID NO: 272488 - DNA, 25 bp, Probe sequence
gatattggcaaccttcagccgatga

SEQ ID NO: 272489 - DNA, 25 bp, Probe sequence
gatagctacaaaaaatcttgtctct

SEQ ID NO: 272490 - DNA, 25 bp, Probe sequence
gattggaaagaaagtcatcgaacta

SEQ ID NO: 272491 - DNA, 25 bp, Probe sequence
gttataaacccaactagagaccagg

SEQ ID NO: 272492 - DNA, 25 bp, Probe sequence
gttttttacaatgcatcatttcaaa

SEQ ID NO: 272493 - DNA, 25 bp, Probe sequence
gtcatcgaactaagatattaccaac

SEQ ID NO: 272494 - DNA, 25 bp, Probe sequence
gtctctatgacacggaaagattgga

SEQ ID NO: 272495 - DNA, 25 bp, Probe sequence
gggacaaaccttatcagatattggc

SEQ ID NO: 272496 - DNA, 25 bp, Probe sequence
ggcaaatgattgggaagttataaac

SEQ ID NO: 272497 - DNA, 25 bp, Probe sequence
tcagatattggcaaccttcagccga

SEQ ID NO: 272498 - DNA, 25 bp, Probe sequence
tcaagaagcaactaagatagctaca

SEQ ID NO: 272499 - DNA, 25 bp, Probe sequence
taaacccaactagagaccaggaatt

SEQ ID NO: 272500 - DNA, 25 bp, Probe sequence
tattggcaaccttcagccgatgacc

SEQ ID NO: 272501 - DNA, 25 bp, Probe sequence
tattaccaacaaatgatagtttttt

SEQ ID NO: 272502 - DNA, 25 bp, Probe sequence
ttatcagatattggcaaccttcagc

SEQ ID NO: 272503 - DNA, 25 bp, Probe sequence
ttcagccgatgacctcatggcaaat

SEQ ID NO: 272504 - DNA, 25 bp, Probe sequence
attttcatcatctatgattccatca

SEQ ID NO: 272505 - DNA, 25 bp, Probe sequence
atcgttttaatacctttcactgcat

SEQ ID NO: 272506 - DNA, 25 bp, Probe sequence
atcctttctggacgattttattaag

SEQ ID NO: 272507 - DNA, 25 bp, Probe sequence
atgtcagtgtttttcagacttgcag

SEQ ID NO: 272508 - DNA, 25 bp, Probe sequence
agagaagcaccatatactatagtat

SEQ ID NO: 272509 - DNA, 25 bp, Probe sequence
agcaatgtttattccattatttttt

SEQ ID NO: 272510 - DNA, 25 bp, Probe sequence
acgtcgttattatcggtgcaagtta

SEQ ID NO: 272511 - DNA, 25 bp, Probe sequence
actatagtattttacttctccttat

SEQ ID NO: 272512 - DNA, 25 bp, Probe sequence
aaatcattagcacgaaacttagtag

SEQ ID NO: 272513 - DNA, 25 bp, Probe sequence
aaagtaaaaggtatcattgccattt

SEQ ID NO: 272514 - DNA, 25 bp, Probe sequence
aacttagtagcaatgtttattccat

SEQ ID NO: 272515 - DNA, 25 bp, Probe sequence
aactcaatcctttctggacgatttt

SEQ ID NO: 272516 - DNA, 25 bp, Probe sequence
aatgaaactcaatcctttctggacg

SEQ ID NO: 272517 - DNA, 25 bp, Probe sequence
aattttcacagcaatacttggattt

SEQ ID NO: 272518 - DNA, 25 bp, Probe sequence
cagtgtttttcagacttgcaggtga

SEQ ID NO: 272519 - DNA, 25 bp, Probe sequence
cttcctgtttttcaaaaatcattag

SEQ ID NO: 272520 - DNA, 25 bp, Probe sequence
ctgtcatcgttttaatacctttcac

SEQ ID NO: 272521 - DNA, 25 bp, Probe sequence
ggttacgtcgttattatcggtgcaa

SEQ ID NO: 272522 - DNA, 25 bp, Probe sequence
gaatctccagatttctatgcaacat

SEQ ID NO: 272523 - DNA, 25 bp, Probe sequence
gaaacctgaattttcatcatctatg

SEQ ID NO: 272524 - DNA, 25 bp, Probe sequence
ggtatgcttttaatagtgaaacctg

SEQ ID NO: 272525 - DNA, 25 bp, Probe sequence
ggtatcattgccattttaatttcgg

SEQ ID NO: 272526 - DNA, 25 bp, Probe sequence
ggtttcagttttatgtcagtgtttt

SEQ ID NO: 272527 - DNA, 25 bp, Probe sequence
ggctattggtttcagttttatgtca

SEQ ID NO: 272528 - DNA, 25 bp, Probe sequence
tgaaaaagcacgccgagacgccaaa

SEQ ID NO: 272529 - DNA, 25 bp, Probe sequence
tctccttattttctgtcatcgtttt

SEQ ID NO: 272530 - DNA, 25 bp, Probe sequence
taatttcggctattggtttcagttt

SEQ ID NO: 272531 - DNA, 25 bp, Probe sequence
taattgctattttaggtatgctttt

SEQ ID NO: 272532 - DNA, 25 bp, Probe sequence
tatgcaacattaggttacgtcgtta

SEQ ID NO: 272533 - DNA, 25 bp, Probe sequence
tatcggtgcaagttattacatgttt

SEQ ID NO: 272534 - DNA, 25 bp, Probe sequence
tatgcatctataattttcacagcaa

SEQ ID NO: 272535 - DNA, 25 bp, Probe sequence
tttacttctccttattttctgtcat

SEQ ID NO: 272536 - DNA, 25 bp, Probe sequence
ttttaatacctttcactgcatatac

SEQ ID NO: 272537 - DNA, 25 bp, Probe sequence
ttacatgtttgaaaaagcacgccga

SEQ ID NO: 272538 - DNA, 25 bp, Probe sequence
atttatggacataacggcactaaaa

SEQ ID NO: 272539 - DNA, 25 bp, Probe sequence
atagctaatcaactacaattttcaa

SEQ ID NO: 272540 - DNA, 25 bp, Probe sequence
atcaactacaattttcaaatgaatc

SEQ ID NO: 272541 - DNA, 25 bp, Probe sequence
atcacaaaactatttctaccaataa

SEQ ID NO: 272542 - DNA, 25 bp, Probe sequence
acagctactaacgaatatctagata

SEQ ID NO: 272543 - DNA, 25 bp, Probe sequence
aaatcacaaaactatttctaccaat

SEQ ID NO: 272544 - DNA, 25 bp, Probe sequence
aaaagacaatgatactcctatagct

SEQ ID NO: 272545 - DNA, 25 bp, Probe sequence
aactgtagagtctgagaaattccat

SEQ ID NO: 272546 - DNA, 25 bp, Probe sequence
aagacaatgatactcctatagctaa

SEQ ID NO: 272547 - DNA, 25 bp, Probe sequence
aatataataattttaggtgtctcta

SEQ ID NO: 272548 - DNA, 25 bp, Probe sequence
cttgatgtttttggtattagttata

SEQ ID NO: 272549 - DNA, 25 bp, Probe sequence
ctcctatagctaatcaactacaatt

SEQ ID NO: 272550 - DNA, 25 bp, Probe sequence
gccagtgtaacactaaatacatata

SEQ ID NO: 272551 - DNA, 25 bp, Probe sequence
gctaatcaactacaattttcaaatg

SEQ ID NO: 272552 - DNA, 25 bp, Probe sequence
gaagaatacaacatttatggacata

SEQ ID NO: 272553 - DNA, 25 bp, Probe sequence
gacaatgatactcctatagctaatc

SEQ ID NO: 272554 - DNA, 25 bp, Probe sequence
gagaaattccatttggatgtcgata

SEQ ID NO: 272555 - DNA, 25 bp, Probe sequence
gagtctgagaaattccatttggatg

SEQ ID NO: 272556 - DNA, 25 bp, Probe sequence
gatactcctatagctaatcaactac

SEQ ID NO: 272557 - DNA, 25 bp, Probe sequence
gatataggaattgataatctcagga

SEQ ID NO: 272558 - DNA, 25 bp, Probe sequence
gatttattctacacaggagatgatg

SEQ ID NO: 272559 - DNA, 25 bp, Probe sequence
gttataatggccagtgtaacactaa

SEQ ID NO: 272560 - DNA, 25 bp, Probe sequence
gtagagtctgagaaattccatttgg

SEQ ID NO: 272561 - DNA, 25 bp, Probe sequence
ggtattagttataatggccagtgta

SEQ ID NO: 272562 - DNA, 25 bp, Probe sequence
ggaattgataatctcaggaattttt

SEQ ID NO: 272563 - DNA, 25 bp, Probe sequence
tggacataacggcactaaaaaagga

SEQ ID NO: 272564 - DNA, 25 bp, Probe sequence
tcatatgatttattctacacaggag

SEQ ID NO: 272565 - DNA, 25 bp, Probe sequence
tcacagctactaacgaatatctaga

SEQ ID NO: 272566 - DNA, 25 bp, Probe sequence
taatctcaggaatttttatacaaaa

SEQ ID NO: 272567 - DNA, 25 bp, Probe sequence
tactcctatagctaatcaactacaa

SEQ ID NO: 272568 - DNA, 25 bp, Probe sequence
tatttctaccaataaagtttcgaca

SEQ ID NO: 272569 - DNA, 25 bp, Probe sequence
ttctaccaataaagtttcgacaaat

SEQ ID NO: 272570 - DNA, 25 bp, Probe sequence
tttattctacacaggagatgatggg

SEQ ID NO: 272571 - DNA, 25 bp, Probe sequence
ttttcatatgatttattctacacag

SEQ ID NO: 272572 - DNA, 25 bp, Probe sequence
atatgtatggtggaattacgttggc

SEQ ID NO: 272573 - DNA, 25 bp, Probe sequence
atctacagacaaagtttctactcaa

SEQ ID NO: 272574 - DNA, 25 bp, Probe sequence
agcatatgctgatgtaggggtaatc

SEQ ID NO: 272575 - DNA, 25 bp, Probe sequence
actgttagcttgtttttcttcacat

SEQ ID NO: 272576 - DNA, 25 bp, Probe sequence
acaccggaactggtcaagcagagag

SEQ ID NO: 272577 - DNA, 25 bp, Probe sequence
aaagcttcaaggagttagttctgga

SEQ ID NO: 272578 - DNA, 25 bp, Probe sequence
aagagattgatattaagttacgaaa

SEQ ID NO: 272579 - DNA, 25 bp, Probe sequence
aatctctgggtcaatggtaagcaaa

SEQ ID NO: 272580 - DNA, 25 bp, Probe sequence
aataatgaaccttcttttacatacg

SEQ ID NO: 272581 - DNA, 25 bp, Probe sequence
aatacctacaaaacgaatacaatat

SEQ ID NO: 272582 - DNA, 25 bp, Probe sequence
aatttttctacttctcatcaattag

SEQ ID NO: 272583 - DNA, 25 bp, Probe sequence
cagagaattttcatttggatgtaga

SEQ ID NO: 272584 - DNA, 25 bp, Probe sequence
ctcactgttagcttgtttttcttca

SEQ ID NO: 272585 - DNA, 25 bp, Probe sequence
ctggtcaagcagagagttttttaaa

SEQ ID NO: 272586 - DNA, 25 bp, Probe sequence
gcttgtttttcttcacatttttaat

SEQ ID NO: 272587 - DNA, 25 bp, Probe sequence
gaaatatacctattaatctctgggt

SEQ ID NO: 272588 - DNA, 25 bp, Probe sequence
gttttacaccggaactggtcaagca

SEQ ID NO: 272589 - DNA, 25 bp, Probe sequence
gatatctttggaataagttactcag

SEQ ID NO: 272590 - DNA, 25 bp, Probe sequence
gttctggaaatttttctacttctca

SEQ ID NO: 272591 - DNA, 25 bp, Probe sequence
gttactcaggtctttgtaatacaaa

SEQ ID NO: 272592 - DNA, 25 bp, Probe sequence
gttagcttgtttttcttcacatttt

SEQ ID NO: 272593 - DNA, 25 bp, Probe sequence
gtaactgctcaagagattgatatta

SEQ ID NO: 272594 - DNA, 25 bp, Probe sequence
ggaataagttactcaggtctttgta

SEQ ID NO: 272595 - DNA, 25 bp, Probe sequence
ggaaatttttctacttctcatcaat

SEQ ID NO: 272596 - DNA, 25 bp, Probe sequence
ggaaaatacactttatattcacagt

SEQ ID NO: 272597 - DNA, 25 bp, Probe sequence
tgaaccttcttttacatacgatttg

SEQ ID NO: 272598 - DNA, 25 bp, Probe sequence
taagcaaaatactatatctacagac

SEQ ID NO: 272599 - DNA, 25 bp, Probe sequence
taaaaaacaatctagcatatgctga

SEQ ID NO: 272600 - DNA, 25 bp, Probe sequence
tacactttatattcacagtttcata

SEQ ID NO: 272601 - DNA, 25 bp, Probe sequence
tacgatttgttttacaccggaactg

SEQ ID NO: 272602 - DNA, 25 bp, Probe sequence
tacatacgatttgttttacaccgga

SEQ ID NO: 272603 - DNA, 25 bp, Probe sequence
tacctattaatctctgggtcaatgg

SEQ ID NO: 272604 - DNA, 25 bp, Probe sequence
ttctacttctcatcaattagagtat

SEQ ID NO: 272605 - DNA, 25 bp, Probe sequence
ttggatgtagagatttcatatgaga

SEQ ID NO: 272606 - DNA, 25 bp, Probe sequence
agaagacggcaacggagtacatgtc

SEQ ID NO: 272607 - DNA, 25 bp, Probe sequence
acgctgatcaacgtaatggttttat

SEQ ID NO: 272608 - DNA, 25 bp, Probe sequence
acttaaacgctgatcaacgtaatgg

SEQ ID NO: 272609 - DNA, 25 bp, Probe sequence
aaacgctgatcaacgtaatggtttt

SEQ ID NO: 272610 - DNA, 25 bp, Probe sequence
aacttaaacgctgatcaacgtaatg

SEQ ID NO: 272611 - DNA, 25 bp, Probe sequence
aacgctgatcaacgtaatggtttta

SEQ ID NO: 272612 - DNA, 25 bp, Probe sequence
aagaagacggcaacggagtacatgt

SEQ ID NO: 272613 - DNA, 25 bp, Probe sequence
cttaaacgctgatcaacgtaatggt

SEQ ID NO: 272614 - DNA, 25 bp, Probe sequence
cctaacttaaacgctgatcaacgta

SEQ ID NO: 272615 - DNA, 25 bp, Probe sequence
taacttaaacgctgatcaacgtaat

SEQ ID NO: 272616 - DNA, 25 bp, Probe sequence
taaacgctgatcaacgtaatggttt

SEQ ID NO: 272617 - DNA, 25 bp, Probe sequence
ttaaacgctgatcaacgtaatggtt

SEQ ID NO: 272618 - DNA, 25 bp, Probe sequence
attcgttatattatgatgactttac

SEQ ID NO: 272619 - DNA, 25 bp, Probe sequence
attatgatgactttacaaatacata

SEQ ID NO: 272620 - DNA, 25 bp, Probe sequence
atattatgatgactttacaaataca

SEQ ID NO: 272621 - DNA, 25 bp, Probe sequence
atacatacagggggtattaatttga

SEQ ID NO: 272622 - DNA, 25 bp, Probe sequence
atgactttacaaatacatacagggg

SEQ ID NO: 272623 - DNA, 25 bp, Probe sequence
atgatgactttacaaatacatacag

SEQ ID NO: 272624 - DNA, 25 bp, Probe sequence
acaaatacatacagggggtattaat

SEQ ID NO: 272625 - DNA, 25 bp, Probe sequence
aatacatacagggggtattaatttg

SEQ ID NO: 272626 - DNA, 25 bp, Probe sequence
caaatacatacagggggtattaatt

SEQ ID NO: 272627 - DNA, 25 bp, Probe sequence
ctttacaaatacatacagggggtat

SEQ ID NO: 272628 - DNA, 25 bp, Probe sequence
cgttatattatgatgactttacaaa

SEQ ID NO: 272629 - DNA, 25 bp, Probe sequence
gactttacaaatacatacagggggt

SEQ ID NO: 272630 - DNA, 25 bp, Probe sequence
gatgactttacaaatacatacaggg

SEQ ID NO: 272631 - DNA, 25 bp, Probe sequence
gttatattatgatgactttacaaat

SEQ ID NO: 272632 - DNA, 25 bp, Probe sequence
tgactttacaaatacatacaggggg

SEQ ID NO: 272633 - DNA, 25 bp, Probe sequence
tgatgactttacaaatacatacagg

SEQ ID NO: 272634 - DNA, 25 bp, Probe sequence
tgcaatacataattcgttatattat

SEQ ID NO: 272635 - DNA, 25 bp, Probe sequence
tcgttatattatgatgactttacaa

SEQ ID NO: 272636 - DNA, 25 bp, Probe sequence
tacaaatacatacagggggtattaa

SEQ ID NO: 272637 - DNA, 25 bp, Probe sequence
tacatacagggggtattaatttgaa

SEQ ID NO: 272638 - DNA, 25 bp, Probe sequence
tatgatgactttacaaatacataca

SEQ ID NO: 272639 - DNA, 25 bp, Probe sequence
tatattatgatgactttacaaatac

SEQ ID NO: 272640 - DNA, 25 bp, Probe sequence
tattatgatgactttacaaatacat

SEQ ID NO: 272641 - DNA, 25 bp, Probe sequence
tttacaaatacatacagggggtatt

SEQ ID NO: 272642 - DNA, 25 bp, Probe sequence
ttatattatgatgactttacaaata

SEQ ID NO: 272643 - DNA, 25 bp, Probe sequence
ttatgatgactttacaaatacatac

SEQ ID NO: 272644 - DNA, 25 bp, Probe sequence
ttacaaatacatacagggggtatta

SEQ ID NO: 272645 - DNA, 25 bp, Probe sequence
ttcgttatattatgatgactttaca

SEQ ID NO: 272646 - DNA, 25 bp, Probe sequence
ttgcaatacataattcgttatatta

SEQ ID NO: 272647 - DNA, 25 bp, Probe sequence
atatgcctaacttaaatgctgatca

SEQ ID NO: 272648 - DNA, 25 bp, Probe sequence
atgacccaagccaaagcgctaacct

SEQ ID NO: 272649 - DNA, 25 bp, Probe sequence
atgaatctcaagcaccgaaagcgga

SEQ ID NO: 272650 - DNA, 25 bp, Probe sequence
agatcaacaaagcgccttctatgaa

SEQ ID NO: 272651 - DNA, 25 bp, Probe sequence
agctggacgtcgtcgcgaactataa

SEQ ID NO: 272652 - DNA, 25 bp, Probe sequence
agcaaccagcaaaccatgcagatgc

SEQ ID NO: 272653 - DNA, 25 bp, Probe sequence
agcgcaacgtaacggcttcattcaa

SEQ ID NO: 272654 - DNA, 25 bp, Probe sequence
aaagacgacccaagccaaagcacta

SEQ ID NO: 272655 - DNA, 25 bp, Probe sequence
aaagctaaacgatgctcaagcacca

SEQ ID NO: 272656 - DNA, 25 bp, Probe sequence
aaagccttaaagacgatccttcagt

SEQ ID NO: 272657 - DNA, 25 bp, Probe sequence
aaaagatgacccaagccaaagtgct

SEQ ID NO: 272658 - DNA, 25 bp, Probe sequence
aacaacgtaacggcttcatccaaag

SEQ ID NO: 272659 - DNA, 25 bp, Probe sequence
aacttaatgactctcaagctccaaa

SEQ ID NO: 272660 - DNA, 25 bp, Probe sequence
aacgcaatggtttcatccaaagcct

SEQ ID NO: 272661 - DNA, 25 bp, Probe sequence
aacgcaatggtttcatccaaagctt

SEQ ID NO: 272662 - DNA, 25 bp, Probe sequence
aagctcaagcattaccagaaactgg

SEQ ID NO: 272663 - DNA, 25 bp, Probe sequence
ctgcgcaacacgatgaagctcaaca

SEQ ID NO: 272664 - DNA, 25 bp, Probe sequence
cggagtacatgtcgttaaacctggt

SEQ ID NO: 272665 - DNA, 25 bp, Probe sequence
cctgctgcaaatgctgcgcaacacg

SEQ ID NO: 272666 - DNA, 25 bp, Probe sequence
gccaaagtgctaacctattgtcaga

SEQ ID NO: 272667 - DNA, 25 bp, Probe sequence
gctccaaaagctgatgcgcaacaaa

SEQ ID NO: 272668 - DNA, 25 bp, Probe sequence
gctgatcaacgcaatggttttatcc

SEQ ID NO: 272669 - DNA, 25 bp, Probe sequence
gcaaacggcactactgctgacaaaa

SEQ ID NO: 272670 - DNA, 25 bp, Probe sequence
gaagacaacaacaagcctggcaaag

SEQ ID NO: 272671 - DNA, 25 bp, Probe sequence
gaagacggcaacaagcctggcaaag

SEQ ID NO: 272672 - DNA, 25 bp, Probe sequence
gaaatcttgaacatgcctaacttaa

SEQ ID NO: 272673 - DNA, 25 bp, Probe sequence
gaaatcttgaatatgcctaacttaa

SEQ ID NO: 272674 - DNA, 25 bp, Probe sequence
gatccaagccaaagtgctaacgttt

SEQ ID NO: 272675 - DNA, 25 bp, Probe sequence
gatgctcaagcaccaaaagctgaca

SEQ ID NO: 272676 - DNA, 25 bp, Probe sequence
ggtgcagcgttattagctggacgtc

SEQ ID NO: 272677 - DNA, 25 bp, Probe sequence
ggtgtaggtattgcatctgtaactt

SEQ ID NO: 272678 - DNA, 25 bp, Probe sequence
ggtacattacttatatctggtggcg

SEQ ID NO: 272679 - DNA, 25 bp, Probe sequence
tctggtggcgtaacacctgctgcaa

SEQ ID NO: 272680 - DNA, 25 bp, Probe sequence
taaacgaatctcaagcaccgaaagc

SEQ ID NO: 272681 - DNA, 25 bp, Probe sequence
caaagccttaaagacgatccttcgg

SEQ ID NO: 272682 - DNA, 25 bp, Probe sequence
attagctggacgtcgtcgcgaacta

SEQ ID NO: 272683 - DNA, 25 bp, Probe sequence
atgacccaagccaaagcgctaacct

SEQ ID NO: 272684 - DNA, 25 bp, Probe sequence
atgaatctcaagcaccgaaagcgga

SEQ ID NO: 272685 - DNA, 25 bp, Probe sequence
agatcaacaaagcgccttctatgaa

SEQ ID NO: 272686 - DNA, 25 bp, Probe sequence
agaagacaacaacaagcctggcaaa

SEQ ID NO: 272687 - DNA, 25 bp, Probe sequence
agcaaccagcaaaccatgcagatgc

SEQ ID NO: 272688 - DNA, 25 bp, Probe sequence
agcgcaacgtaacggcttcattcaa

SEQ ID NO: 272689 - DNA, 25 bp, Probe sequence
aaagacgacccaagccaaagcacta

SEQ ID NO: 272690 - DNA, 25 bp, Probe sequence
aaaagatgacccaagccaaagtgct

SEQ ID NO: 272691 - DNA, 25 bp, Probe sequence
aacaacgtaacggcttcatccaaag

SEQ ID NO: 272692 - DNA, 25 bp, Probe sequence
aacttaatgactctcaagctccaaa

SEQ ID NO: 272693 - DNA, 25 bp, Probe sequence
aacgcaatggtttcatccaaagcct

SEQ ID NO: 272694 - DNA, 25 bp, Probe sequence
aacgcaatggtttcatccaaagctt

SEQ ID NO: 272695 - DNA, 25 bp, Probe sequence
aagctcaagcattaccagaaactgg

SEQ ID NO: 272696 - DNA, 25 bp, Probe sequence
ctgcgcaacacgatgaagctcaaca

SEQ ID NO: 272697 - DNA, 25 bp, Probe sequence
cggagtacatgtcgttaaacctggt

SEQ ID NO: 272698 - DNA, 25 bp, Probe sequence
cctgctgcaaatgctgcgcaacacg

SEQ ID NO: 272699 - DNA, 25 bp, Probe sequence
gccaaagtgctaacctattgtcaga

SEQ ID NO: 272700 - DNA, 25 bp, Probe sequence
gctccaaaagctgatgcgcaacaaa

SEQ ID NO: 272701 - DNA, 25 bp, Probe sequence
gctgatcaacgcaatggttttatcc

SEQ ID NO: 272702 - DNA, 25 bp, Probe sequence
gcaaacggcactactgctgacaaaa

SEQ ID NO: 272703 - DNA, 25 bp, Probe sequence
gaagacaacaacaagcctggcaaag

SEQ ID NO: 272704 - DNA, 25 bp, Probe sequence
gaagacggcaacaagcctggcaaag

SEQ ID NO: 272705 - DNA, 25 bp, Probe sequence
gaaaatccattcatcggtacaactg

SEQ ID NO: 272706 - DNA, 25 bp, Probe sequence
gaaatcttgaacatgcctaacttaa

SEQ ID NO: 272707 - DNA, 25 bp, Probe sequence
gaaatcttgaatatgcctaacttaa

SEQ ID NO: 272708 - DNA, 25 bp, Probe sequence
gatgctcaagcaccaaaagctgaca

SEQ ID NO: 272709 - DNA, 25 bp, Probe sequence
ggtgtaggtattgcatctgtaactt

SEQ ID NO: 272710 - DNA, 25 bp, Probe sequence
ggtacattacttatatctggtggcg

SEQ ID NO: 272711 - DNA, 25 bp, Probe sequence
tggtggattatcattagccttaggt

SEQ ID NO: 272712 - DNA, 25 bp, Probe sequence
tctggtggcgtaacacctgctgcaa

SEQ ID NO: 272713 - DNA, 25 bp, Probe sequence
taaacgaatctcaagcaccgaaagc

SEQ ID NO: 272714 - DNA, 25 bp, Probe sequence
tagccttaggtgcagcgttattagc

SEQ ID NO: 272715 - DNA, 25 bp, Probe sequence
acatgcctaacttgaacgaagaaca

SEQ ID NO: 272716 - DNA, 25 bp, Probe sequence
aacatgcctaacttgaacgaagaac

SEQ ID NO: 272717 - DNA, 25 bp, Probe sequence
gaacatgcctaacttgaacgaagaa

SEQ ID NO: 272718 - DNA, 25 bp, Probe sequence
atattaaaaccggtactacagatat

SEQ ID NO: 272719 - DNA, 25 bp, Probe sequence
atatggcaatcaacttttcatgaaa

SEQ ID NO: 272720 - DNA, 25 bp, Probe sequence
atagtcagctcagtaacaacaacac

SEQ ID NO: 272721 - DNA, 25 bp, Probe sequence
atggcaatcaacttttcatgaaaac

SEQ ID NO: 272722 - DNA, 25 bp, Probe sequence
agttgcaactacctgataatgaagt

SEQ ID NO: 272723 - DNA, 25 bp, Probe sequence
agatcgttcttcagaaagatataaa

SEQ ID NO: 272724 - DNA, 25 bp, Probe sequence
acgtatagtcagctcagtaacaaca

SEQ ID NO: 272725 - DNA, 25 bp, Probe sequence
acacgtatagtcagctcagtaacaa

SEQ ID NO: 272726 - DNA, 25 bp, Probe sequence
aaagtattttatagttttatcgatg

SEQ ID NO: 272727 - DNA, 25 bp, Probe sequence
aaacacgtatagtcagctcagtaac

SEQ ID NO: 272728 - DNA, 25 bp, Probe sequence
aacacgtatagtcagctcagtaaca

SEQ ID NO: 272729 - DNA, 25 bp, Probe sequence
aacaggtgatttagtcacttatgat

SEQ ID NO: 272730 - DNA, 25 bp, Probe sequence
aatggcatgcacaaaaaagtatttt

SEQ ID NO: 272731 - DNA, 25 bp, Probe sequence
aatactacagtaaaaacaggtgatt

SEQ ID NO: 272732 - DNA, 25 bp, Probe sequence
cacgtatagtcagctcagtaacaac

SEQ ID NO: 272733 - DNA, 25 bp, Probe sequence
cagctcagtaacaacaacactattg

SEQ ID NO: 272734 - DNA, 25 bp, Probe sequence
gccgcagattctgatattaatatta

SEQ ID NO: 272735 - DNA, 25 bp, Probe sequence
gctcagtaacaacaacactattgct

SEQ ID NO: 272736 - DNA, 25 bp, Probe sequence
gaaaacacgtatagtcagctcagta

SEQ ID NO: 272737 - DNA, 25 bp, Probe sequence
gataaagaaaatggcatgcacaaaa

SEQ ID NO: 272738 - DNA, 25 bp, Probe sequence
gtatagtcagctcagtaacaacaac

SEQ ID NO: 272739 - DNA, 25 bp, Probe sequence
gtattttatagttttatcgatgata

SEQ ID NO: 272740 - DNA, 25 bp, Probe sequence
gtatatggcaatcaacttttcatga

SEQ ID NO: 272741 - DNA, 25 bp, Probe sequence
gtaacaacaacactattgctaggtt

SEQ ID NO: 272742 - DNA, 25 bp, Probe sequence
gtcagctcagtaacaacaacactat

SEQ ID NO: 272743 - DNA, 25 bp, Probe sequence
ggtgaatcaaaattggggaccatat

SEQ ID NO: 272744 - DNA, 25 bp, Probe sequence
ggtgatttagtcacttatgataaag

SEQ ID NO: 272745 - DNA, 25 bp, Probe sequence
tggaaaggtaccaatactaaagata

SEQ ID NO: 272746 - DNA, 25 bp, Probe sequence
tggacttcaacaaattggaaaggta

SEQ ID NO: 272747 - DNA, 25 bp, Probe sequence
tgcaactacctgataatgaagtagc

SEQ ID NO: 272748 - DNA, 25 bp, Probe sequence
taatattaaaaccggtactacagat

SEQ ID NO: 272749 - DNA, 25 bp, Probe sequence
taacaacaacactattgctaggttc

SEQ ID NO: 272750 - DNA, 25 bp, Probe sequence
tagatgtaatatacgaacgagttcg

SEQ ID NO: 272751 - DNA, 25 bp, Probe sequence
tagtcagctcagtaacaacaacact

SEQ ID NO: 272752 - DNA, 25 bp, Probe sequence
atatctatacttgatgaccctgtag

SEQ ID NO: 272753 - DNA, 25 bp, Probe sequence
ataccattacaacgcgtactgatgt

SEQ ID NO: 272754 - DNA, 25 bp, Probe sequence
atactcgtatctatggcaatcagtt

SEQ ID NO: 272755 - DNA, 25 bp, Probe sequence
atcttcgcgttaatctttttagcca

SEQ ID NO: 272756 - DNA, 25 bp, Probe sequence
atgaccctgtagcgattggcttagg

SEQ ID NO: 272757 - DNA, 25 bp, Probe sequence
agaagtattacgcttacctcgcatt

SEQ ID NO: 272758 - DNA, 25 bp, Probe sequence
acaatcgttcgcggaagttatgcta

SEQ ID NO: 272759 - DNA, 25 bp, Probe sequence
aaaagttactaatgtcagcaatgat

SEQ ID NO: 272760 - DNA, 25 bp, Probe sequence
aatctttttagccatcgtttcagtg

SEQ ID NO: 272761 - DNA, 25 bp, Probe sequence
catatacttattattaaccgtgaaa

SEQ ID NO: 272762 - DNA, 25 bp, Probe sequence
ctatacttgatgaccctgtagcgat

SEQ ID NO: 272763 - DNA, 25 bp, Probe sequence
cgttcgcggaagttatgctaaaaag

SEQ ID NO: 272764 - DNA, 25 bp, Probe sequence
ccattcttcatatacttattattaa

SEQ ID NO: 272765 - DNA, 25 bp, Probe sequence
gccatcgtttcagtggtaagtatga

SEQ ID NO: 272766 - DNA, 25 bp, Probe sequence
gcttacctcgcattacacttgcgat

SEQ ID NO: 272767 - DNA, 25 bp, Probe sequence
gctttataccattacaacgcgtact

SEQ ID NO: 272768 - DNA, 25 bp, Probe sequence
gaaaacaatcgttcgcggaagttat

SEQ ID NO: 272769 - DNA, 25 bp, Probe sequence
gatcaattcactttagaagtattac

SEQ ID NO: 272770 - DNA, 25 bp, Probe sequence
gttgtctttattgcatttttcagcc

SEQ ID NO: 272771 - DNA, 25 bp, Probe sequence
gttaatctttttagccatcgtttca

SEQ ID NO: 272772 - DNA, 25 bp, Probe sequence
gtatctatggcaatcagtttagtag

SEQ ID NO: 272773 - DNA, 25 bp, Probe sequence
gtcagcaatgattggtgccatatca

SEQ ID NO: 272774 - DNA, 25 bp, Probe sequence
gtctttattgcatttttcagccatt

SEQ ID NO: 272775 - DNA, 25 bp, Probe sequence
ggttcaagctttataccattacaac

SEQ ID NO: 272776 - DNA, 25 bp, Probe sequence
tgtactttataaatccaaatgacag

SEQ ID NO: 272777 - DNA, 25 bp, Probe sequence
tgattggtgccatatcaattgttat

SEQ ID NO: 272778 - DNA, 25 bp, Probe sequence
tcgcgttaatctttttagccatcgt

SEQ ID NO: 272779 - DNA, 25 bp, Probe sequence
tctcatcttcgcgttaatcttttta

SEQ ID NO: 272780 - DNA, 25 bp, Probe sequence
tcacaggtggtgctagcttaagtgc

SEQ ID NO: 272781 - DNA, 25 bp, Probe sequence
tcaagctttataccattacaacgcg

SEQ ID NO: 272782 - DNA, 25 bp, Probe sequence
tacaacgcgtactgatgtactttat

SEQ ID NO: 272783 - DNA, 25 bp, Probe sequence
ttttagccatcgtttcagtggtaag

SEQ ID NO: 272784 - DNA, 25 bp, Probe sequence
ttattgcatttttcagccatttaac

SEQ ID NO: 272785 - DNA, 25 bp, Probe sequence
ttgatgaccctgtagcgattggctt

SEQ ID NO: 272786 - DNA, 25 bp, Probe sequence
attagttttcggtgtattatctgca

SEQ ID NO: 272787 - DNA, 25 bp, Probe sequence
atatcttatccttagtttagttgct

SEQ ID NO: 272788 - DNA, 25 bp, Probe sequence
atcttatccttagtttagttgctaa

SEQ ID NO: 272789 - DNA, 25 bp, Probe sequence
atccttagtttagttgctaatttat

SEQ ID NO: 272790 - DNA, 25 bp, Probe sequence
atgaaatatcttatccttagtttag

SEQ ID NO: 272791 - DNA, 25 bp, Probe sequence
atgatgattgtattagtgattccga

SEQ ID NO: 272792 - DNA, 25 bp, Probe sequence
atgattgtattagtgattccgataa

SEQ ID NO: 272793 - DNA, 25 bp, Probe sequence
agtgattccgataatgatttctggg

SEQ ID NO: 272794 - DNA, 25 bp, Probe sequence
agttttcggtgtattatctgcaatt

SEQ ID NO: 272795 - DNA, 25 bp, Probe sequence
acatttaatgactttgccaaagttt

SEQ ID NO: 272796 - DNA, 25 bp, Probe sequence
acaatgtacatttaatgactttgcc

SEQ ID NO: 272797 - DNA, 25 bp, Probe sequence
aaatatcttatccttagtttagttg

SEQ ID NO: 272798 - DNA, 25 bp, Probe sequence
aaacatacatattttttaacatcat

SEQ ID NO: 272799 - DNA, 25 bp, Probe sequence
aatatcttatccttagtttagttgc

SEQ ID NO: 272800 - DNA, 25 bp, Probe sequence
catacatattttttaacatcatatt

SEQ ID NO: 272801 - DNA, 25 bp, Probe sequence
gctaatttattagttttcggtgtat

SEQ ID NO: 272802 - DNA, 25 bp, Probe sequence
gatgattgtattagtgattccgata

SEQ ID NO: 272803 - DNA, 25 bp, Probe sequence
gattgtattagtgattccgataatg

SEQ ID NO: 272804 - DNA, 25 bp, Probe sequence
gttttcggtgtattatctgcaattg

SEQ ID NO: 272805 - DNA, 25 bp, Probe sequence
gtacatttaatgactttgccaaagt

SEQ ID NO: 272806 - DNA, 25 bp, Probe sequence
gtgattccgataatgatttctggga

SEQ ID NO: 272807 - DNA, 25 bp, Probe sequence
tgattccgataatgatttctgggat

SEQ ID NO: 272808 - DNA, 25 bp, Probe sequence
tgtacatttaatgactttgccaaag

SEQ ID NO: 272809 - DNA, 25 bp, Probe sequence
tgatgattgtattagtgattccgat

SEQ ID NO: 272810 - DNA, 25 bp, Probe sequence
tgaaatatcttatccttagtttagt

SEQ ID NO: 272811 - DNA, 25 bp, Probe sequence
tcttatccttagtttagttgctaat

SEQ ID NO: 272812 - DNA, 25 bp, Probe sequence
tagttttcggtgtattatctgcaat

SEQ ID NO: 272813 - DNA, 25 bp, Probe sequence
tagtgattccgataatgatttctgg

SEQ ID NO: 272814 - DNA, 25 bp, Probe sequence
tatcttatccttagtttagttgcta

SEQ ID NO: 272815 - DNA, 25 bp, Probe sequence
tattagttttcggtgtattatctgc

SEQ ID NO: 272816 - DNA, 25 bp, Probe sequence
ttttcggtgtattatctgcaattgg

SEQ ID NO: 272817 - DNA, 25 bp, Probe sequence
ttatccttagtttagttgctaattt

SEQ ID NO: 272818 - DNA, 25 bp, Probe sequence
ttagtgattccgataatgatttctg

SEQ ID NO: 272819 - DNA, 25 bp, Probe sequence
ttagttttcggtgtattatctgcaa

SEQ ID NO: 272820 - DNA, 25 bp, Probe sequence
atctcattaccaccaaaagaaggcg

SEQ ID NO: 272821 - DNA, 25 bp, Probe sequence
atgagtgcacaaaacgaaacgctac

SEQ ID NO: 272822 - DNA, 25 bp, Probe sequence
atgatctcattaccaccaaaagaag

SEQ ID NO: 272823 - DNA, 25 bp, Probe sequence
agtgcacaaaacgaaacgctacatc

SEQ ID NO: 272824 - DNA, 25 bp, Probe sequence
accgctttagtgttaatcgacctgc

SEQ ID NO: 272825 - DNA, 25 bp, Probe sequence
aaccgctttagtgttaatcgacctg

SEQ ID NO: 272826 - DNA, 25 bp, Probe sequence
aatgatctcattaccaccaaaagaa

SEQ ID NO: 272827 - DNA, 25 bp, Probe sequence
cacaaaacgaaacgctacatcaatt

SEQ ID NO: 272828 - DNA, 25 bp, Probe sequence
cagatatgatgagtgcacaaaacga

SEQ ID NO: 272829 - DNA, 25 bp, Probe sequence
cgctttagtgttaatcgacctgcaa

SEQ ID NO: 272830 - DNA, 25 bp, Probe sequence
cgcgtgaatttctatgatggtaaag

SEQ ID NO: 272831 - DNA, 25 bp, Probe sequence
ccgctttagtgttaatcgacctgca

SEQ ID NO: 272832 - DNA, 25 bp, Probe sequence
gcgtgaatttctatgatggtaaaga

SEQ ID NO: 272833 - DNA, 25 bp, Probe sequence
gcacaaaacgaaacgctacatcaat

SEQ ID NO: 272834 - DNA, 25 bp, Probe sequence
gagtgcacaaaacgaaacgctacat

SEQ ID NO: 272835 - DNA, 25 bp, Probe sequence
gatgagtgcacaaaacgaaacgcta

SEQ ID NO: 272836 - DNA, 25 bp, Probe sequence
gatctcattaccaccaaaagaaggc

SEQ ID NO: 272837 - DNA, 25 bp, Probe sequence
gatatgatgagtgcacaaaacgaaa

SEQ ID NO: 272838 - DNA, 25 bp, Probe sequence
gttcgcgtgaatttctatgatggta

SEQ ID NO: 272839 - DNA, 25 bp, Probe sequence
gttacagatatgatgagtgcacaaa

SEQ ID NO: 272840 - DNA, 25 bp, Probe sequence
gtgcacaaaacgaaacgctacatca

SEQ ID NO: 272841 - DNA, 25 bp, Probe sequence
gtgaatttctatgatggtaaagatg

SEQ ID NO: 272842 - DNA, 25 bp, Probe sequence
tgttcgcgtgaatttctatgatggt

SEQ ID NO: 272843 - DNA, 25 bp, Probe sequence
tgagtgcacaaaacgaaacgctaca

SEQ ID NO: 272844 - DNA, 25 bp, Probe sequence
tgatctcattaccaccaaaagaagg

SEQ ID NO: 272845 - DNA, 25 bp, Probe sequence
tgatgagtgcacaaaacgaaacgct

SEQ ID NO: 272846 - DNA, 25 bp, Probe sequence
tgcacaaaacgaaacgctacatcaa

SEQ ID NO: 272847 - DNA, 25 bp, Probe sequence
tctcattaccaccaaaagaaggcga

SEQ ID NO: 272848 - DNA, 25 bp, Probe sequence
tacagatatgatgagtgcacaaaac

SEQ ID NO: 272849 - DNA, 25 bp, Probe sequence
tttgttacagatatgatgagtgcac

SEQ ID NO: 272850 - DNA, 25 bp, Probe sequence
tttgttcgcgtgaatttctatgatg

SEQ ID NO: 272851 - DNA, 25 bp, Probe sequence
ttagaaaaaacaatggctttatcgc

SEQ ID NO: 272852 - DNA, 25 bp, Probe sequence
ttcgcgtgaatttctatgatggtaa

SEQ ID NO: 272853 - DNA, 25 bp, Probe sequence
ttgttcgcgtgaatttctatgatgg

SEQ ID NO: 272854 - DNA, 25 bp, Probe sequence
atttatgtctcgctctcaaatgtaa

SEQ ID NO: 272855 - DNA, 25 bp, Probe sequence
atgtctcgctctcaaatgtaaatta

SEQ ID NO: 272856 - DNA, 25 bp, Probe sequence
agtgcaatcgaatattcagacttac

SEQ ID NO: 272857 - DNA, 25 bp, Probe sequence
acgcaatgtagttatggtggtgtta

SEQ ID NO: 272858 - DNA, 25 bp, Probe sequence
aaatgaggcactttcaaagaaattt

SEQ ID NO: 272859 - DNA, 25 bp, Probe sequence
caaggtggcgacattgttaaagggt

SEQ ID NO: 272860 - DNA, 25 bp, Probe sequence
aatcgaatattcagacttacatcat

SEQ ID NO: 272861 - DNA, 25 bp, Probe sequence
ctgtttatcatttatgtctcgctct

SEQ ID NO: 272862 - DNA, 25 bp, Probe sequence
ccagcctgtttatcatttatgtctc

SEQ ID NO: 272863 - DNA, 25 bp, Probe sequence
gcctgtttatcatttatgtctcgct

SEQ ID NO: 272864 - DNA, 25 bp, Probe sequence
gaatattcagacttacatcataaaa

SEQ ID NO: 272865 - DNA, 25 bp, Probe sequence
gaatgagaagtataagttgtacgaa

SEQ ID NO: 272866 - DNA, 25 bp, Probe sequence
gacaaattgcatttagatatctatt

SEQ ID NO: 272867 - DNA, 25 bp, Probe sequence
gactgttgaagcatgatttgttatt

SEQ ID NO: 272868 - DNA, 25 bp, Probe sequence
gaggtattaaaaatgtatgctgata

SEQ ID NO: 272869 - DNA, 25 bp, Probe sequence
gatgattataagaatataccttgta

SEQ ID NO: 272870 - DNA, 25 bp, Probe sequence
gatagactgttgaagcatgatttgt

SEQ ID NO: 272871 - DNA, 25 bp, Probe sequence
gttgtacgaacaaggtggcgacatt

SEQ ID NO: 272872 - DNA, 25 bp, Probe sequence
gtttatcatttatgtctcgctctca

SEQ ID NO: 272873 - DNA, 25 bp, Probe sequence
gtagttatggtggtgttactttaag

SEQ ID NO: 272874 - DNA, 25 bp, Probe sequence
ggtggcgacattgttaaagggtatg

SEQ ID NO: 272875 - DNA, 25 bp, Probe sequence
gtaatttatggattgacggacatca

SEQ ID NO: 272876 - DNA, 25 bp, Probe sequence
gtctcgctctcaaatgtaaattaat

SEQ ID NO: 272877 - DNA, 25 bp, Probe sequence
gtcccagcctgtttatcatttatgt

SEQ ID NO: 272878 - DNA, 25 bp, Probe sequence
ggtggtgttactttaagtgacaata

SEQ ID NO: 272879 - DNA, 25 bp, Probe sequence
tgtcccagcctgtttatcatttatg

SEQ ID NO: 272880 - DNA, 25 bp, Probe sequence
tgatttgttatttcatgacatgttc

SEQ ID NO: 272881 - DNA, 25 bp, Probe sequence
tcccagcctgtttatcatttatgtc

SEQ ID NO: 272882 - DNA, 25 bp, Probe sequence
tatcatttatgtctcgctctcaaat

SEQ ID NO: 272883 - DNA, 25 bp, Probe sequence
tataccttgtaatttatggattgac

SEQ ID NO: 272884 - DNA, 25 bp, Probe sequence
tttagatatctatttattcaaatca

SEQ ID NO: 272885 - DNA, 25 bp, Probe sequence
ttatggtggtgttactttaagtgac

SEQ ID NO: 272886 - DNA, 25 bp, Probe sequence
ttatgtctcgctctcaaatgtaaat

SEQ ID NO: 272887 - DNA, 25 bp, Probe sequence
ttatcatttatgtctcgctctcaaa

SEQ ID NO: 272888 - DNA, 25 bp, Probe sequence
attagtcaagacattgttaccaaag

SEQ ID NO: 272889 - DNA, 25 bp, Probe sequence
atattttgttgcaatttgtcatgtt

SEQ ID NO: 272890 - DNA, 25 bp, Probe sequence
atgcgtaaacaagcacgctcgtatt

SEQ ID NO: 272891 - DNA, 25 bp, Probe sequence
agttatgcaacactttgatttaaat

SEQ ID NO: 272892 - DNA, 25 bp, Probe sequence
acacaactcgcgactttatatggtt

SEQ ID NO: 272893 - DNA, 25 bp, Probe sequence
aaacattgattctttctcattatat

SEQ ID NO: 272894 - DNA, 25 bp, Probe sequence
aattaccaaaagcgtggttcatact

SEQ ID NO: 272895 - DNA, 25 bp, Probe sequence
cattttatgactcaattcgttaaag

SEQ ID NO: 272896 - DNA, 25 bp, Probe sequence
ctgatgtttttaaagtgccgtctac

SEQ ID NO: 272897 - DNA, 25 bp, Probe sequence
gcctaaattacaggtgaaatctcct

SEQ ID NO: 272898 - DNA, 25 bp, Probe sequence
gcgactttatatggtttaacagcag

SEQ ID NO: 272899 - DNA, 25 bp, Probe sequence
gcgtagatgatcaacaattagagca

SEQ ID NO: 272900 - DNA, 25 bp, Probe sequence
gaattcggcttaagaccaaaggatc

SEQ ID NO: 272901 - DNA, 25 bp, Probe sequence
gaatcagaaccaactatatcgcaaa

SEQ ID NO: 272902 - DNA, 25 bp, Probe sequence
gaatccaaagccacaaagtgatgaa

SEQ ID NO: 272903 - DNA, 25 bp, Probe sequence
gaagcgattggattgttaaaggcgt

SEQ ID NO: 272904 - DNA, 25 bp, Probe sequence
gagcatcgtcgatttcatgagttga

SEQ ID NO: 272905 - DNA, 25 bp, Probe sequence
gagcaagatcgacaagcatttctag

SEQ ID NO: 272906 - DNA, 25 bp, Probe sequence
gagtccaattgatatgttagcttct

SEQ ID NO: 272907 - DNA, 25 bp, Probe sequence
gatccaatgttgtcaatctttttat

SEQ ID NO: 272908 - DNA, 25 bp, Probe sequence
gatacaagtgatattccgattaatg

SEQ ID NO: 272909 - DNA, 25 bp, Probe sequence
gttaccaaagatgcaaagcgtttaa

SEQ ID NO: 272910 - DNA, 25 bp, Probe sequence
gtttagacaacaaatggacttactt

SEQ ID NO: 272911 - DNA, 25 bp, Probe sequence
gtgaagtcgagcatcgtcgatttca

SEQ ID NO: 272912 - DNA, 25 bp, Probe sequence
gtggacaacagttatcctttgaaga

SEQ ID NO: 272913 - DNA, 25 bp, Probe sequence
ggatcaattcaaagttatgcaacac

SEQ ID NO: 272914 - DNA, 25 bp, Probe sequence
ggaacacgaaaatcaaatgcctaaa

SEQ ID NO: 272915 - DNA, 25 bp, Probe sequence
ggcgtttgtcaaacatgatgaacaa

SEQ ID NO: 272916 - DNA, 25 bp, Probe sequence
tgagggttctagcggaaattaccaa

SEQ ID NO: 272917 - DNA, 25 bp, Probe sequence
tgttagcttcttggtctgaatcaga

SEQ ID NO: 272918 - DNA, 25 bp, Probe sequence
tgaaacttcctaaagcgtatatttt

SEQ ID NO: 272919 - DNA, 25 bp, Probe sequence
ttccgattaatgaaccgtaccaagg

SEQ ID NO: 272920 - DNA, 25 bp, Probe sequence
taacagcagatggcatgaagcatgt

SEQ ID NO: 272921 - DNA, 25 bp, Probe sequence
ttacttgaacaaacgagtccaattg

SEQ ID NO: 272922 - DNA, 25 bp, Probe sequence
tttattttggggaggccagccttgg

SEQ ID NO: 272923 - DNA, 25 bp, Probe sequence
attttggggaggccagccttggcga

SEQ ID NO: 272924 - DNA, 25 bp, Probe sequence
attttttaatggacccatggtggca

SEQ ID NO: 272925 - DNA, 25 bp, Probe sequence
atggacccatggtggcaatcttttt

SEQ ID NO: 272926 - DNA, 25 bp, Probe sequence
aggccagccttggcgatttcatgag

SEQ ID NO: 272927 - DNA, 25 bp, Probe sequence
acccatggtggcaatctttttattt

SEQ ID NO: 272928 - DNA, 25 bp, Probe sequence
acttgaagcgattgggttggtaaag

SEQ ID NO: 272929 - DNA, 25 bp, Probe sequence
aaacaacaaatgggcttacttgaag

SEQ ID NO: 272930 - DNA, 25 bp, Probe sequence
aacctggtggaccagaaacaccatt

SEQ ID NO: 272931 - DNA, 25 bp, Probe sequence
aatggacccatggtggcaatctttt

SEQ ID NO: 272932 - DNA, 25 bp, Probe sequence
cagaaacaccatttggttaccaatt

SEQ ID NO: 272933 - DNA, 25 bp, Probe sequence
caccatttggttaccaattaattca

SEQ ID NO: 272934 - DNA, 25 bp, Probe sequence
cagccttggcgatttcatgaggtgg

SEQ ID NO: 272935 - DNA, 25 bp, Probe sequence
catggtggcaatctttttattttgg

SEQ ID NO: 272936 - DNA, 25 bp, Probe sequence
cttggcgatttcatgaggtggagaa

SEQ ID NO: 272937 - DNA, 25 bp, Probe sequence
cccatggtggcaatctttttatttt

SEQ ID NO: 272938 - DNA, 25 bp, Probe sequence
gccagccttggcgatttcatgaggt

SEQ ID NO: 272939 - DNA, 25 bp, Probe sequence
ccagccttggcgatttcatgaggtg

SEQ ID NO: 272940 - DNA, 25 bp, Probe sequence
gccttggcgatttcatgaggtggag

SEQ ID NO: 272941 - DNA, 25 bp, Probe sequence
gcaaacctggtggaccagaaacacc

SEQ ID NO: 272942 - DNA, 25 bp, Probe sequence
gaccagaaacaccatttggttacca

SEQ ID NO: 272943 - DNA, 25 bp, Probe sequence
gacccatggtggcaatctttttatt

SEQ ID NO: 272944 - DNA, 25 bp, Probe sequence
gaggtggagaaatactttgaggatt

SEQ ID NO: 272945 - DNA, 25 bp, Probe sequence
gtttggcaaacctggtggaccagaa

SEQ ID NO: 272946 - DNA, 25 bp, Probe sequence
gtggcaatctttttattttggggag

SEQ ID NO: 272947 - DNA, 25 bp, Probe sequence
gggtttggcaaacctggtggaccag

SEQ ID NO: 272948 - DNA, 25 bp, Probe sequence
ggtttggcaaacctggtggaccaga

SEQ ID NO: 272949 - DNA, 25 bp, Probe sequence
ggtggaccagaaacaccatttggtt

SEQ ID NO: 272950 - DNA, 25 bp, Probe sequence
tggacccatggtggcaatcttttta

SEQ ID NO: 272951 - DNA, 25 bp, Probe sequence
tggtggcaatctttttattttgggg

SEQ ID NO: 272952 - DNA, 25 bp, Probe sequence
tggagtttaaacaacaaatgggctt

SEQ ID NO: 272953 - DNA, 25 bp, Probe sequence
tgaagcgattgggttggtaaagggg

SEQ ID NO: 272954 - DNA, 25 bp, Probe sequence
tattttggggaggccagccttggcg

SEQ ID NO: 272955 - DNA, 25 bp, Probe sequence
ttaatggacccatggtggcaatctt

SEQ ID NO: 272956 - DNA, 25 bp, Probe sequence
atctaaaccagttcaaattgttgat

SEQ ID NO: 272957 - DNA, 25 bp, Probe sequence
atgaagtcaattactacagatgaat

SEQ ID NO: 272958 - DNA, 25 bp, Probe sequence
atgtgctggtggagttcgaagcgct

SEQ ID NO: 272959 - DNA, 25 bp, Probe sequence
atggcattgatgccgtaaatgtcga

SEQ ID NO: 272960 - DNA, 25 bp, Probe sequence
accagttcaaattgttgatgttcgt

SEQ ID NO: 272961 - DNA, 25 bp, Probe sequence
aaaccagttcaaattgttgatgttc

SEQ ID NO: 272962 - DNA, 25 bp, Probe sequence
cattgatgccgtaaatgtcgaaggc

SEQ ID NO: 272963 - DNA, 25 bp, Probe sequence
ctggtggagttcgaagcgctaaagt

SEQ ID NO: 272964 - DNA, 25 bp, Probe sequence
ccgtaaatgtcgaaggcggcatgca

SEQ ID NO: 272965 - DNA, 25 bp, Probe sequence
gctggtggagttcgaagcgctaaag

SEQ ID NO: 272966 - DNA, 25 bp, Probe sequence
gaatctaaaccagttcaaattgttg

SEQ ID NO: 272967 - DNA, 25 bp, Probe sequence
gaatatttagaggcaaatggcattg

SEQ ID NO: 272968 - DNA, 25 bp, Probe sequence
gaagtcaattactacagatgaatta

SEQ ID NO: 272969 - DNA, 25 bp, Probe sequence
gaagcgctaaagttgtagaatattt

SEQ ID NO: 272970 - DNA, 25 bp, Probe sequence
gagttcgaagcgctaaagttgtaga

SEQ ID NO: 272971 - DNA, 25 bp, Probe sequence
gaggcaaatggcattgatgccgtaa

SEQ ID NO: 272972 - DNA, 25 bp, Probe sequence
gttcgaagcgctaaagttgtagaat

SEQ ID NO: 272973 - DNA, 25 bp, Probe sequence
gtatgtgctggtggagttcgaagcg

SEQ ID NO: 272974 - DNA, 25 bp, Probe sequence
gtaaatgtcgaaggcggcatgcacg

SEQ ID NO: 272975 - DNA, 25 bp, Probe sequence
gtgctggtggagttcgaagcgctaa

SEQ ID NO: 272976 - DNA, 25 bp, Probe sequence
gtggagttcgaagcgctaaagttgt

SEQ ID NO: 272977 - DNA, 25 bp, Probe sequence
ttgatgccgtaaatgtcgaaggcgg

SEQ ID NO: 272978 - DNA, 25 bp, Probe sequence
ggtggagttcgaagcgctaaagttg

SEQ ID NO: 272979 - DNA, 25 bp, Probe sequence
ggagttcgaagcgctaaagttgtag

SEQ ID NO: 272980 - DNA, 25 bp, Probe sequence
ggcattgatgccgtaaatgtcgaag

SEQ ID NO: 272981 - DNA, 25 bp, Probe sequence
tggggcgatgaaggtttggaaataa

SEQ ID NO: 272982 - DNA, 25 bp, Probe sequence
tgtgctggtggagttcgaagcgcta

SEQ ID NO: 272983 - DNA, 25 bp, Probe sequence
tgctggtggagttcgaagcgctaaa

SEQ ID NO: 272984 - DNA, 25 bp, Probe sequence
taaatgtcgaaggcggcatgcacgc

SEQ ID NO: 272985 - DNA, 25 bp, Probe sequence
tagaggcaaatggcattgatgccgt

SEQ ID NO: 272986 - DNA, 25 bp, Probe sequence
tatattgtatgtgctggtggagttc

SEQ ID NO: 272987 - DNA, 25 bp, Probe sequence
tattgtatgtgctggtggagttcga

SEQ ID NO: 272988 - DNA, 25 bp, Probe sequence
ttcaaattgttgatgttcgtactga

SEQ ID NO: 272989 - DNA, 25 bp, Probe sequence
ttgtatgtgctggtggagttcgaag

SEQ ID NO: 272990 - DNA, 25 bp, Probe sequence
atgctcactgaatttcataagaaag

SEQ ID NO: 272991 - DNA, 25 bp, Probe sequence
aggagttcacaagatgaccgtagat

SEQ ID NO: 272992 - DNA, 25 bp, Probe sequence
agaggtatttcgaaaagaactgcta

SEQ ID NO: 272993 - DNA, 25 bp, Probe sequence
acgctattcgtatcctagtcgatag

SEQ ID NO: 272994 - DNA, 25 bp, Probe sequence
actacagcagttgctcaatacttag

SEQ ID NO: 272995 - DNA, 25 bp, Probe sequence
acaatggttccaacatgatcctaaa

SEQ ID NO: 272996 - DNA, 25 bp, Probe sequence
aaagatactaaacataaccaagctg

SEQ ID NO: 272997 - DNA, 25 bp, Probe sequence
aacataaccaagctgtagtactaca

SEQ ID NO: 272998 - DNA, 25 bp, Probe sequence
aagaactgctaacctagattattgg

SEQ ID NO: 272999 - DNA, 25 bp, Probe sequence
aatggttccaacatgatcctaaact

SEQ ID NO: 273000 - DNA, 25 bp, Probe sequence
cacaagatgaccgtagatattggac

SEQ ID NO: 273001 - DNA, 25 bp, Probe sequence
ctgtagtactacagcagttgctcaa

SEQ ID NO: 273002 - DNA, 25 bp, Probe sequence
cgacaatggttccaacatgatccta

SEQ ID NO: 273003 - DNA, 25 bp, Probe sequence
gctattcgtatcctagtcgatagag

SEQ ID NO: 273004 - DNA, 25 bp, Probe sequence
gaactgctaacctagattattggtt

SEQ ID NO: 273005 - DNA, 25 bp, Probe sequence
gaaaagaactgctaacctagattat

SEQ ID NO: 273006 - DNA, 25 bp, Probe sequence
gaaaggagttcacaagatgaccgta

SEQ ID NO: 273007 - DNA, 25 bp, Probe sequence
gacgctattcgtatcctagtcgata

SEQ ID NO: 273008 - DNA, 25 bp, Probe sequence
gagttcacaagatgaccgtagatat

SEQ ID NO: 273009 - DNA, 25 bp, Probe sequence
gatgaccgtagatattggacggatt

SEQ ID NO: 273010 - DNA, 25 bp, Probe sequence
gatactaaacataaccaagctgtag

SEQ ID NO: 273011 - DNA, 25 bp, Probe sequence
gttaaaagacattgccccttctact

SEQ ID NO: 273012 - DNA, 25 bp, Probe sequence
gtatcctagtcgatagagtctggcc

SEQ ID NO: 273013 - DNA, 25 bp, Probe sequence
gtagtactacagcagttgctcaata

SEQ ID NO: 273014 - DNA, 25 bp, Probe sequence
gtagatattggacggatttatgaca

SEQ ID NO: 273015 - DNA, 25 bp, Probe sequence
gtactacagcagttgctcaatactt

SEQ ID NO: 273016 - DNA, 25 bp, Probe sequence
tggttaaaagacattgccccttcta

SEQ ID NO: 273017 - DNA, 25 bp, Probe sequence
tggttccaacatgatcctaaacttt

SEQ ID NO: 273018 - DNA, 25 bp, Probe sequence
tattcgtatcctagtcgatagagtc

SEQ ID NO: 273019 - DNA, 25 bp, Probe sequence
tttcgaaaagaactgctaacctaga

SEQ ID NO: 273020 - DNA, 25 bp, Probe sequence
ttggttaaaagacattgccccttct

SEQ ID NO: 273021 - DNA, 25 bp, Probe sequence
ttattggttaaaagacattgcccct

SEQ ID NO: 273022 - DNA, 25 bp, Probe sequence
ttaaaagacattgccccttctactg

SEQ ID NO: 273023 - DNA, 25 bp, Probe sequence
ttcgtatcctagtcgatagagtctg

SEQ ID NO: 273024 - DNA, 25 bp, Probe sequence
acttatttcatgccttcgtcaaaaa

SEQ ID NO: 273025 - DNA, 25 bp, Probe sequence
aaacgtaatacattcggtcattggg

SEQ ID NO: 273026 - DNA, 25 bp, Probe sequence
aaacgatctgtatctactatctcac

SEQ ID NO: 273027 - DNA, 25 bp, Probe sequence
aagagttctcttgttatcaaaatat

SEQ ID NO: 273028 - DNA, 25 bp, Probe sequence
aagggtgcattgctactttcgcaga

SEQ ID NO: 273029 - DNA, 25 bp, Probe sequence
aatctgttttaaaaccatctatcga

SEQ ID NO: 273030 - DNA, 25 bp, Probe sequence
aataaccttatcaaacatctaccta

SEQ ID NO: 273031 - DNA, 25 bp, Probe sequence
aatttcgaacttatttcatgccttc

SEQ ID NO: 273032 - DNA, 25 bp, Probe sequence
caaacatctacctaaaggtgccgtt

SEQ ID NO: 273033 - DNA, 25 bp, Probe sequence
catctatcgatggattaactctaat

SEQ ID NO: 273034 - DNA, 25 bp, Probe sequence
ccactggtctcctgaacaaatcgta

SEQ ID NO: 273035 - DNA, 25 bp, Probe sequence
ctgtatctactatctcacgtgaaat

SEQ ID NO: 273036 - DNA, 25 bp, Probe sequence
cctgatcgttcctctaattctatgg

SEQ ID NO: 273037 - DNA, 25 bp, Probe sequence
cgctgatccatattccgcatggcaa

SEQ ID NO: 273038 - DNA, 25 bp, Probe sequence
gcaacttaactatgcattagactca

SEQ ID NO: 273039 - DNA, 25 bp, Probe sequence
gaacgcgcacgtatagaggttttac

SEQ ID NO: 273040 - DNA, 25 bp, Probe sequence
gaacaaatcgtaggtcgtctattac

SEQ ID NO: 273041 - DNA, 25 bp, Probe sequence
gacacaattgtatccagcagaggca

SEQ ID NO: 273042 - DNA, 25 bp, Probe sequence
gagctataaccatcttacactaact

SEQ ID NO: 273043 - DNA, 25 bp, Probe sequence
gttcctctaattctatggagacggc

SEQ ID NO: 273044 - DNA, 25 bp, Probe sequence
gtaagtttaatattggccgtcctat

SEQ ID NO: 273045 - DNA, 25 bp, Probe sequence
gtcgtctattacaaaaccaaatctg

SEQ ID NO: 273046 - DNA, 25 bp, Probe sequence
ggtgccgttaaaactattactgtcg

SEQ ID NO: 273047 - DNA, 25 bp, Probe sequence
ggtcattgggaagctgacacaattg

SEQ ID NO: 273048 - DNA, 25 bp, Probe sequence
ggaagtttccttatgaagttttatg

SEQ ID NO: 273049 - DNA, 25 bp, Probe sequence
ggagtgccaacatgagctataacca

SEQ ID NO: 273050 - DNA, 25 bp, Probe sequence
ggagacggcaattaataaccttatc

SEQ ID NO: 273051 - DNA, 25 bp, Probe sequence
tcgtcctactcgatttactccagaa

SEQ ID NO: 273052 - DNA, 25 bp, Probe sequence
tcttacactaactgaacgcgcacgt

SEQ ID NO: 273053 - DNA, 25 bp, Probe sequence
taatattggccgtcctatttcacaa

SEQ ID NO: 273054 - DNA, 25 bp, Probe sequence
tattccgcatggcaaagaggtacaa

SEQ ID NO: 273055 - DNA, 25 bp, Probe sequence
tattaatgtctacttcgctgatcca

SEQ ID NO: 273056 - DNA, 25 bp, Probe sequence
ttaaaatgccactggtctcctgaac

SEQ ID NO: 273057 - DNA, 25 bp, Probe sequence
ttgtgtacttatgcctgatcgttcc

SEQ ID NO: 273058 - DNA, 25 bp, Probe sequence
atcacagtttgataaggttgcagaa

SEQ ID NO: 273059 - DNA, 25 bp, Probe sequence
atgggttgggcaatgggggttgtct

SEQ ID NO: 273060 - DNA, 25 bp, Probe sequence
atgtctccaaagaaaggcagagcat

SEQ ID NO: 273061 - DNA, 25 bp, Probe sequence
atggcttgagcatttagcttcagat

SEQ ID NO: 273062 - DNA, 25 bp, Probe sequence
acaccgcctacctatgtttataaat

SEQ ID NO: 273063 - DNA, 25 bp, Probe sequence
aaatgctcgatcttgccaaatctaa

SEQ ID NO: 273064 - DNA, 25 bp, Probe sequence
aaaggcagagcattagatatcggat

SEQ ID NO: 273065 - DNA, 25 bp, Probe sequence
aacacatctaaatcatggcttgagc

SEQ ID NO: 273066 - DNA, 25 bp, Probe sequence
aagtacctatctgaacaaaattatt

SEQ ID NO: 273067 - DNA, 25 bp, Probe sequence
cgaacaacctttcatcatttggatg

SEQ ID NO: 273068 - DNA, 25 bp, Probe sequence
gcatttagcttcagataagtaccta

SEQ ID NO: 273069 - DNA, 25 bp, Probe sequence
gaatttataatcacaacacatctaa

SEQ ID NO: 273070 - DNA, 25 bp, Probe sequence
gaagtggtagggattgatatttcta

SEQ ID NO: 273071 - DNA, 25 bp, Probe sequence
gaagtttgattttattgtaagccga

SEQ ID NO: 273072 - DNA, 25 bp, Probe sequence
gaaaagttgttgcctggatgccaat

SEQ ID NO: 273073 - DNA, 25 bp, Probe sequence
gagtttttaccgcattgtttcaaat

SEQ ID NO: 273074 - DNA, 25 bp, Probe sequence
gggcaatccaagagtttttaccgca

SEQ ID NO: 273075 - DNA, 25 bp, Probe sequence
gatgtggctcgggtttgttagtgga

SEQ ID NO: 273076 - DNA, 25 bp, Probe sequence
gatgatatagccagcgtaatacagc

SEQ ID NO: 273077 - DNA, 25 bp, Probe sequence
gatatcggatgtggctcgggtttgt

SEQ ID NO: 273078 - DNA, 25 bp, Probe sequence
gatatttctaatcaaatgctcgatc

SEQ ID NO: 273079 - DNA, 25 bp, Probe sequence
gattattcattctttgtgtctaata

SEQ ID NO: 273080 - DNA, 25 bp, Probe sequence
gttgcctggatgccaattccataaa

SEQ ID NO: 273081 - DNA, 25 bp, Probe sequence
gtatctgaagtcgagacaccgccta

SEQ ID NO: 273082 - DNA, 25 bp, Probe sequence
gtaagccgaacaacctttcatcatt

SEQ ID NO: 273083 - DNA, 25 bp, Probe sequence
gtcaactaacaaatacggtctatct

SEQ ID NO: 273084 - DNA, 25 bp, Probe sequence
gggcaatgggggttgtctggacaaa

SEQ ID NO: 273085 - DNA, 25 bp, Probe sequence
ggttgcagaagattacgatttcgtg

SEQ ID NO: 273086 - DNA, 25 bp, Probe sequence
tgccaaatctaaacgtcaactaaca

SEQ ID NO: 273087 - DNA, 25 bp, Probe sequence
tacggtctatctgaatatgaatgca

SEQ ID NO: 273088 - DNA, 25 bp, Probe sequence
tacgatttcgtgaatgagcttttga

SEQ ID NO: 273089 - DNA, 25 bp, Probe sequence
tagccagcgtaatacagcaaatgaa

SEQ ID NO: 273090 - DNA, 25 bp, Probe sequence
ttaccgcattgtttcaaatttggaa

SEQ ID NO: 273091 - DNA, 25 bp, Probe sequence
ttctttgtgtctaatatgtctccaa

SEQ ID NO: 273092 - DNA, 25 bp, Probe sequence
ataaagttggcgatagaattactgc

SEQ ID NO: 273093 - DNA, 25 bp, Probe sequence
attaaaagcatggcagcattagcca

SEQ ID NO: 273094 - DNA, 25 bp, Probe sequence
attataaagttggcgatagaattac

SEQ ID NO: 273095 - DNA, 25 bp, Probe sequence
attttattcaaaagcacattgaaca

SEQ ID NO: 273096 - DNA, 25 bp, Probe sequence
atgttacgcaagttaaagatacaaa

SEQ ID NO: 273097 - DNA, 25 bp, Probe sequence
agtcgttgaagagacacaacaaata

SEQ ID NO: 273098 - DNA, 25 bp, Probe sequence
agtcattaaaagcatggcagcatta

SEQ ID NO: 273099 - DNA, 25 bp, Probe sequence
agacaatattttaaattttgatgca

SEQ ID NO: 273100 - DNA, 25 bp, Probe sequence
acaatattttaaattttgatgcata

SEQ ID NO: 273101 - DNA, 25 bp, Probe sequence
aagacaatattttaaattttgatgc

SEQ ID NO: 273102 - DNA, 25 bp, Probe sequence
cagtcgttgaagagacacaacaaat

SEQ ID NO: 273103 - DNA, 25 bp, Probe sequence
ctgcagtcgttgaagagacacaaca

SEQ ID NO: 273104 - DNA, 25 bp, Probe sequence
cgttgaagagacacaacaaatagca

SEQ ID NO: 273105 - DNA, 25 bp, Probe sequence
gctgcagtcgttgaagagacacaac

SEQ ID NO: 273106 - DNA, 25 bp, Probe sequence
gcagtcgttgaagagacacaacaaa

SEQ ID NO: 273107 - DNA, 25 bp, Probe sequence
gacaatattttaaattttgatgcat

SEQ ID NO: 273108 - DNA, 25 bp, Probe sequence
gattttattcaaaagcacattgaac

SEQ ID NO: 273109 - DNA, 25 bp, Probe sequence
gattataaagttggcgatagaatta

SEQ ID NO: 273110 - DNA, 25 bp, Probe sequence
gtcattaaaagcatggcagcattag

SEQ ID NO: 273111 - DNA, 25 bp, Probe sequence
gtcgttgaagagacacaacaaatag

SEQ ID NO: 273112 - DNA, 25 bp, Probe sequence
tgttacgcaagttaaagatacaaat

SEQ ID NO: 273113 - DNA, 25 bp, Probe sequence
tgcagtcgttgaagagacacaacaa

SEQ ID NO: 273114 - DNA, 25 bp, Probe sequence
tgctgcagtcgttgaagagacacaa

SEQ ID NO: 273115 - DNA, 25 bp, Probe sequence
tcgttgaagagacacaacaaatagc

SEQ ID NO: 273116 - DNA, 25 bp, Probe sequence
taaaagcatggcagcattagccatt

SEQ ID NO: 273117 - DNA, 25 bp, Probe sequence
tataaagttggcgatagaattactg

SEQ ID NO: 273118 - DNA, 25 bp, Probe sequence
tagtcattaaaagcatggcagcatt

SEQ ID NO: 273119 - DNA, 25 bp, Probe sequence
tattcaaaagcacattgaacaataa

SEQ ID NO: 273120 - DNA, 25 bp, Probe sequence
tttattcaaaagcacattgaacaat

SEQ ID NO: 273121 - DNA, 25 bp, Probe sequence
ttttattcaaaagcacattgaacaa

SEQ ID NO: 273122 - DNA, 25 bp, Probe sequence
ttataaagttggcgatagaattact

SEQ ID NO: 273123 - DNA, 25 bp, Probe sequence
ttattcaaaagcacattgaacaata

SEQ ID NO: 273124 - DNA, 25 bp, Probe sequence
ttaaaagcatggcagcattagccat

SEQ ID NO: 273125 - DNA, 25 bp, Probe sequence
ttgaagagacacaacaaatagcaaa

SEQ ID NO: 273126 - DNA, 25 bp, Probe sequence
attgtatagcattttacacaggagt

SEQ ID NO: 273127 - DNA, 25 bp, Probe sequence
attttacacaggagtctggacttga

SEQ ID NO: 273128 - DNA, 25 bp, Probe sequence
atagcattttacacaggagtctgga

SEQ ID NO: 273129 - DNA, 25 bp, Probe sequence
atggtaaaaacattgtatagcattt

SEQ ID NO: 273130 - DNA, 25 bp, Probe sequence
aggagtctggacttgactgagttta

SEQ ID NO: 273131 - DNA, 25 bp, Probe sequence
agcattttacacaggagtctggact

SEQ ID NO: 273132 - DNA, 25 bp, Probe sequence
acattgtatagcattttacacagga

SEQ ID NO: 273133 - DNA, 25 bp, Probe sequence
acaggagtctggacttgactgagtt

SEQ ID NO: 273134 - DNA, 25 bp, Probe sequence
acacaggagtctggacttgactgag

SEQ ID NO: 273135 - DNA, 25 bp, Probe sequence
aaacattgtatagcattttacacag

SEQ ID NO: 273136 - DNA, 25 bp, Probe sequence
aaaaacattgtatagcattttacac

SEQ ID NO: 273137 - DNA, 25 bp, Probe sequence
aaaacattgtatagcattttacaca

SEQ ID NO: 273138 - DNA, 25 bp, Probe sequence
aacattgtatagcattttacacagg

SEQ ID NO: 273139 - DNA, 25 bp, Probe sequence
aagagattatacacctaaaaaggtg

SEQ ID NO: 273140 - DNA, 25 bp, Probe sequence
cacaggagtctggacttgactgagt

SEQ ID NO: 273141 - DNA, 25 bp, Probe sequence
caggagtctggacttgactgagttt

SEQ ID NO: 273142 - DNA, 25 bp, Probe sequence
cattttacacaggagtctggacttg

SEQ ID NO: 273143 - DNA, 25 bp, Probe sequence
cattgtatagcattttacacaggag

SEQ ID NO: 273144 - DNA, 25 bp, Probe sequence
gcattttacacaggagtctggactt

SEQ ID NO: 273145 - DNA, 25 bp, Probe sequence
gagtctggacttgactgagtttatg

SEQ ID NO: 273146 - DNA, 25 bp, Probe sequence
gtatagcattttacacaggagtctg

SEQ ID NO: 273147 - DNA, 25 bp, Probe sequence
ggtaaaaacattgtatagcatttta

SEQ ID NO: 273148 - DNA, 25 bp, Probe sequence
ggagtctggacttgactgagtttat

SEQ ID NO: 273149 - DNA, 25 bp, Probe sequence
tggtaaaaacattgtatagcatttt

SEQ ID NO: 273150 - DNA, 25 bp, Probe sequence
tgtatagcattttacacaggagtct

SEQ ID NO: 273151 - DNA, 25 bp, Probe sequence
tctctatttaattagtttttgaagt

SEQ ID NO: 273152 - DNA, 25 bp, Probe sequence
tcaaaaaaaagagattatacaccta

SEQ ID NO: 273153 - DNA, 25 bp, Probe sequence
tacacaggagtctggacttgactga

SEQ ID NO: 273154 - DNA, 25 bp, Probe sequence
tagcattttacacaggagtctggac

SEQ ID NO: 273155 - DNA, 25 bp, Probe sequence
tatagcattttacacaggagtctgg

SEQ ID NO: 273156 - DNA, 25 bp, Probe sequence
tttacacaggagtctggacttgact

SEQ ID NO: 273157 - DNA, 25 bp, Probe sequence
ttttacacaggagtctggacttgac

SEQ ID NO: 273158 - DNA, 25 bp, Probe sequence
ttacacaggagtctggacttgactg

SEQ ID NO: 273159 - DNA, 25 bp, Probe sequence
ttgtatagcattttacacaggagtc

SEQ ID NO: 273160 - DNA, 25 bp, Probe sequence
attccagttgatttagacgctcttg

SEQ ID NO: 273161 - DNA, 25 bp, Probe sequence
agggcctcgcaacagtggatgaatc

SEQ ID NO: 273162 - DNA, 25 bp, Probe sequence
atggcagatgcgtttattccggtga

SEQ ID NO: 273163 - DNA, 25 bp, Probe sequence
agctcattgatctcatcatccaact

SEQ ID NO: 273164 - DNA, 25 bp, Probe sequence
acttgtctttgcgaacttctctgaa

SEQ ID NO: 273165 - DNA, 25 bp, Probe sequence
acatatcgtacgtgtcgcgacaggt

SEQ ID NO: 273166 - DNA, 25 bp, Probe sequence
aaaggtgcctcaacgcaaaccatat

SEQ ID NO: 273167 - DNA, 25 bp, Probe sequence
aaaaggtggcacaccgctggttgtg

SEQ ID NO: 273168 - DNA, 25 bp, Probe sequence
aacaacatatcgacttaccgcaaga

SEQ ID NO: 273169 - DNA, 25 bp, Probe sequence
aatgattgacgctagtgacctgaaa

SEQ ID NO: 273170 - DNA, 25 bp, Probe sequence
caacgctttacgccaaacacaaact

SEQ ID NO: 273171 - DNA, 25 bp, Probe sequence
gttgcgatgacgggtgacggtacga

SEQ ID NO: 273172 - DNA, 25 bp, Probe sequence
gccatttatcggcattaagctcatt

SEQ ID NO: 273173 - DNA, 25 bp, Probe sequence
gcgatgctgattgctttggctgtgt

SEQ ID NO: 273174 - DNA, 25 bp, Probe sequence
gcggacgttctgtagagacttgtgg

SEQ ID NO: 273175 - DNA, 25 bp, Probe sequence
gaagtgggcatgctgcttgccttag

SEQ ID NO: 273176 - DNA, 25 bp, Probe sequence
gaagcattagctgaaggtcgcggta

SEQ ID NO: 273177 - DNA, 25 bp, Probe sequence
gacgctcttgtcaaaggggtgtcta

SEQ ID NO: 273178 - DNA, 25 bp, Probe sequence
gagaatatattccgtttactgctga

SEQ ID NO: 273179 - DNA, 25 bp, Probe sequence
gatggactcgtagaacgtttccgtg

SEQ ID NO: 273180 - DNA, 25 bp, Probe sequence
gaggaacttctgtagcttcagactg

SEQ ID NO: 273181 - DNA, 25 bp, Probe sequence
gattatcttcttggtcgttatttta

SEQ ID NO: 273182 - DNA, 25 bp, Probe sequence
gttctatcgcagatgacacaccaga

SEQ ID NO: 273183 - DNA, 25 bp, Probe sequence
gttagtttacggcttaggcggtatg

SEQ ID NO: 273184 - DNA, 25 bp, Probe sequence
gtttatggcggctatgcctgcgatg

SEQ ID NO: 273185 - DNA, 25 bp, Probe sequence
gtaccattacctacggcaaccgtat

SEQ ID NO: 273186 - DNA, 25 bp, Probe sequence
gtgtattgaagctctatcctgttta

SEQ ID NO: 273187 - DNA, 25 bp, Probe sequence
gtgtggatcgctttgtggcagagtg

SEQ ID NO: 273188 - DNA, 25 bp, Probe sequence
ggtcgcggtaaagcacaagccaacg

SEQ ID NO: 273189 - DNA, 25 bp, Probe sequence
ggcggtatgatcgtgccatttatcg

SEQ ID NO: 273190 - DNA, 25 bp, Probe sequence
tgcgattttaccagccatgtttatg

SEQ ID NO: 273191 - DNA, 25 bp, Probe sequence
taatgacacgtggctcactcactac

SEQ ID NO: 273192 - DNA, 25 bp, Probe sequence
tacgaatgacgcgccagctttagca

SEQ ID NO: 273193 - DNA, 25 bp, Probe sequence
tatgcatctgcattcacctgaatca

SEQ ID NO: 273194 - DNA, 25 bp, Probe sequence
attaaaaatggctgattctgtataa

SEQ ID NO: 273195 - DNA, 25 bp, Probe sequence
attttattcttttctttaatcatga

SEQ ID NO: 273196 - DNA, 25 bp, Probe sequence
atatgttggatgaatgtggcatgat

SEQ ID NO: 273197 - DNA, 25 bp, Probe sequence
atctatattcgcttaaaactaggta

SEQ ID NO: 273198 - DNA, 25 bp, Probe sequence
atggctatcgtcgcatttatatcta

SEQ ID NO: 273199 - DNA, 25 bp, Probe sequence
agtgggtacattatcaatcgagtga

SEQ ID NO: 273200 - DNA, 25 bp, Probe sequence
aggtgctaaacgtattgttagttat

SEQ ID NO: 273201 - DNA, 25 bp, Probe sequence
accttatcgacgttcaacgccacaa

SEQ ID NO: 273202 - DNA, 25 bp, Probe sequence
accgaaagcgaatttatcgtttgat

SEQ ID NO: 273203 - DNA, 25 bp, Probe sequence
acggtccaatggaaggtgtatgggg

SEQ ID NO: 273204 - DNA, 25 bp, Probe sequence
aaagcagtaatacgtcaaaagcgaa

SEQ ID NO: 273205 - DNA, 25 bp, Probe sequence
aacgccacaaatcacatcagaaaat

SEQ ID NO: 273206 - DNA, 25 bp, Probe sequence
aattcatgattttattcttttcttt

SEQ ID NO: 273207 - DNA, 25 bp, Probe sequence
cgttcaacgccacaaatcacatcag

SEQ ID NO: 273208 - DNA, 25 bp, Probe sequence
gcgaaaaccttatcgacgttcaacg

SEQ ID NO: 273209 - DNA, 25 bp, Probe sequence
gcaaatgtatcgataacggtccaat

SEQ ID NO: 273210 - DNA, 25 bp, Probe sequence
gacaatttgacattgatacgccaaa

SEQ ID NO: 273211 - DNA, 25 bp, Probe sequence
gagcgagttattataagtgggtaca

SEQ ID NO: 273212 - DNA, 25 bp, Probe sequence
gagctaggcccttctaacaataatc

SEQ ID NO: 273213 - DNA, 25 bp, Probe sequence
gttagttatgagctaggcccttcta

SEQ ID NO: 273214 - DNA, 25 bp, Probe sequence
gtatttaaaacattcaatcaagcga

SEQ ID NO: 273215 - DNA, 25 bp, Probe sequence
gtattttatttcatagtgaccgagg

SEQ ID NO: 273216 - DNA, 25 bp, Probe sequence
gtatgtcacgtgttagcaaatgtat

SEQ ID NO: 273217 - DNA, 25 bp, Probe sequence
gtaagatatatttgagtgccattta

SEQ ID NO: 273218 - DNA, 25 bp, Probe sequence
gtcgcatttatatctatattcgctt

SEQ ID NO: 273219 - DNA, 25 bp, Probe sequence
gtgccatttatgacttaggtgctaa

SEQ ID NO: 273220 - DNA, 25 bp, Probe sequence
gtgaccgaggttttcaatatacatc

SEQ ID NO: 273221 - DNA, 25 bp, Probe sequence
gtggcatgattcaaagtatgtcacg

SEQ ID NO: 273222 - DNA, 25 bp, Probe sequence
taatggtatttatggctatcgtcgc

SEQ ID NO: 273223 - DNA, 25 bp, Probe sequence
taagcttaatcgacaatttgacatt

SEQ ID NO: 273224 - DNA, 25 bp, Probe sequence
tagagaatgaacagcttaagcgaga

SEQ ID NO: 273225 - DNA, 25 bp, Probe sequence
taggcccttctaacaataatcaatt

SEQ ID NO: 273226 - DNA, 25 bp, Probe sequence
taggcatttctagagcgagttatta

SEQ ID NO: 273227 - DNA, 25 bp, Probe sequence
ttgtgtcgtattttaggcatttcta

SEQ ID NO: 273228 - DNA, 25 bp, Probe sequence
atacaatcactattcaaaggaacta

SEQ ID NO: 273229 - DNA, 25 bp, Probe sequence
atcaatctcctaaaactggggtgta

SEQ ID NO: 273230 - DNA, 25 bp, Probe sequence
atctcatacggtcaaatttaccagt

SEQ ID NO: 273231 - DNA, 25 bp, Probe sequence
aggcgtgtcgtttcaatacttaatc

SEQ ID NO: 273232 - DNA, 25 bp, Probe sequence
agagaaaacaaatcacggcatacaa

SEQ ID NO: 273233 - DNA, 25 bp, Probe sequence
agaatatgaaaaaggcgtgtcgttt

SEQ ID NO: 273234 - DNA, 25 bp, Probe sequence
accagtgggttcataagtatcaagc

SEQ ID NO: 273235 - DNA, 25 bp, Probe sequence
acaattgttgaatattacttgaatc

SEQ ID NO: 273236 - DNA, 25 bp, Probe sequence
aaacccaaatctatgatgacgccag

SEQ ID NO: 273237 - DNA, 25 bp, Probe sequence
aaaagcacaaaatcgattattagag

SEQ ID NO: 273238 - DNA, 25 bp, Probe sequence
aacaatcttatagagaagttgcaga

SEQ ID NO: 273239 - DNA, 25 bp, Probe sequence
aactggggtgtatatcatgaaagca

SEQ ID NO: 273240 - DNA, 25 bp, Probe sequence
aacccatggtattgaaacactactt

SEQ ID NO: 273241 - DNA, 25 bp, Probe sequence
aaccacatttgaagaacgtgtaaca

SEQ ID NO: 273242 - DNA, 25 bp, Probe sequence
aagacatcgcaatcaaatacaatat

SEQ ID NO: 273243 - DNA, 25 bp, Probe sequence
aagtagacatagatgtactgctata

SEQ ID NO: 273244 - DNA, 25 bp, Probe sequence
aatggattagtagatggcagaggca

SEQ ID NO: 273245 - DNA, 25 bp, Probe sequence
aatgtcaatactttgtatcctaagt

SEQ ID NO: 273246 - DNA, 25 bp, Probe sequence
aatctatgatgacgccagaagaaca

SEQ ID NO: 273247 - DNA, 25 bp, Probe sequence
aatcgatacattacaattagatatt

SEQ ID NO: 273248 - DNA, 25 bp, Probe sequence
aatcaacccaagacatcgcaatcaa

SEQ ID NO: 273249 - DNA, 25 bp, Probe sequence
aatacaatattcgtagttcgacaca

SEQ ID NO: 273250 - DNA, 25 bp, Probe sequence
caaatcaatcaacccaagacatcgc

SEQ ID NO: 273251 - DNA, 25 bp, Probe sequence
cacggcatacaaaacgatcgaagcg

SEQ ID NO: 273252 - DNA, 25 bp, Probe sequence
cgtttcaatacttaatcgatacatt

SEQ ID NO: 273253 - DNA, 25 bp, Probe sequence
gaagggagctttatttatgtcaata

SEQ ID NO: 273254 - DNA, 25 bp, Probe sequence
gaacactttaatatctcatacggtc

SEQ ID NO: 273255 - DNA, 25 bp, Probe sequence
gaaacactacttacacaaaaacaat

SEQ ID NO: 273256 - DNA, 25 bp, Probe sequence
gatgtactgctatatatgtttcaag

SEQ ID NO: 273257 - DNA, 25 bp, Probe sequence
gttgcagaacactttaatatctcat

SEQ ID NO: 273258 - DNA, 25 bp, Probe sequence
ggtcaaatttaccagtgggttcata

SEQ ID NO: 273259 - DNA, 25 bp, Probe sequence
ggttcataagtatcaagcacatggt

SEQ ID NO: 273260 - DNA, 25 bp, Probe sequence
ggcagaggcaaaggaaaacccaaat

SEQ ID NO: 273261 - DNA, 25 bp, Probe sequence
tattcgtagttcgacacaagtcaaa

SEQ ID NO: 273262 - DNA, 25 bp, Probe sequence
attgctgattacttagctttcagtt

SEQ ID NO: 273263 - DNA, 25 bp, Probe sequence
attcagtttattttgttcatgtaat

SEQ ID NO: 273264 - DNA, 25 bp, Probe sequence
attacttagctttcagtttgcaatt

SEQ ID NO: 273265 - DNA, 25 bp, Probe sequence
attttgttcatgtaatgcatacact

SEQ ID NO: 273266 - DNA, 25 bp, Probe sequence
atgacacagtagctagtatgattat

SEQ ID NO: 273267 - DNA, 25 bp, Probe sequence
agtagctagtatgattattgaattt

SEQ ID NO: 273268 - DNA, 25 bp, Probe sequence
agtttattttgttcatgtaatgcat

SEQ ID NO: 273269 - DNA, 25 bp, Probe sequence
actacattcagtttattttgttcat

SEQ ID NO: 273270 - DNA, 25 bp, Probe sequence
acttagctttcagtttgcaattaac

SEQ ID NO: 273271 - DNA, 25 bp, Probe sequence
aattagatgagattgctgattactt

SEQ ID NO: 273272 - DNA, 25 bp, Probe sequence
cacagtagctagtatgattattgaa

SEQ ID NO: 273273 - DNA, 25 bp, Probe sequence
caggaaaatgactaacacattaaca

SEQ ID NO: 273274 - DNA, 25 bp, Probe sequence
cttagctttcagtttgcaattaact

SEQ ID NO: 273275 - DNA, 25 bp, Probe sequence
ctacattcagtttattttgttcatg

SEQ ID NO: 273276 - DNA, 25 bp, Probe sequence
gctgattacttagctttcagtttgc

SEQ ID NO: 273277 - DNA, 25 bp, Probe sequence
gaaatttaaatgacacagtagctag

SEQ ID NO: 273278 - DNA, 25 bp, Probe sequence
gacacagtagctagtatgattattg

SEQ ID NO: 273279 - DNA, 25 bp, Probe sequence
gagattgctgattacttagctttca

SEQ ID NO: 273280 - DNA, 25 bp, Probe sequence
gatgagattgctgattacttagctt

SEQ ID NO: 273281 - DNA, 25 bp, Probe sequence
gatacacaattagatgagattgctg

SEQ ID NO: 273282 - DNA, 25 bp, Probe sequence
gattacttagctttcagtttgcaat

SEQ ID NO: 273283 - DNA, 25 bp, Probe sequence
gattgctgattacttagctttcagt

SEQ ID NO: 273284 - DNA, 25 bp, Probe sequence
gttactttacctaaactacattcag

SEQ ID NO: 273285 - DNA, 25 bp, Probe sequence
tgattacttagctttcagtttgcaa

SEQ ID NO: 273286 - DNA, 25 bp, Probe sequence
tgagattgctgattacttagctttc

SEQ ID NO: 273287 - DNA, 25 bp, Probe sequence
tgaagttactttacctaaactacat

SEQ ID NO: 273288 - DNA, 25 bp, Probe sequence
tcagtttattttgttcatgtaatgc

SEQ ID NO: 273289 - DNA, 25 bp, Probe sequence
taaatgacacagtagctagtatgat

SEQ ID NO: 273290 - DNA, 25 bp, Probe sequence
tacttagctttcagtttgcaattaa

SEQ ID NO: 273291 - DNA, 25 bp, Probe sequence
tactttacctaaactacattcagtt

SEQ ID NO: 273292 - DNA, 25 bp, Probe sequence
ttagatgagattgctgattacttag

SEQ ID NO: 273293 - DNA, 25 bp, Probe sequence
ttattttgttcatgtaatgcataca

SEQ ID NO: 273294 - DNA, 25 bp, Probe sequence
ttgctgattacttagctttcagttt

SEQ ID NO: 273295 - DNA, 25 bp, Probe sequence
ttgttcatgtaatgcatacactaac

SEQ ID NO: 273296 - DNA, 25 bp, Probe sequence
attatagatttcatcgaacaagtta

SEQ ID NO: 273297 - DNA, 25 bp, Probe sequence
atttcatcgaacaagttacggcaca

SEQ ID NO: 273298 - DNA, 25 bp, Probe sequence
atagatttcatcgaacaagttacgg

SEQ ID NO: 273299 - DNA, 25 bp, Probe sequence
atgttaaacaacctgcgcattacac

SEQ ID NO: 273300 - DNA, 25 bp, Probe sequence
agatttcatcgaacaagttacggca

SEQ ID NO: 273301 - DNA, 25 bp, Probe sequence
agacaatgttaaacaacctgcgcat

SEQ ID NO: 273302 - DNA, 25 bp, Probe sequence
acctgcgcattacacatacggcgac

SEQ ID NO: 273303 - DNA, 25 bp, Probe sequence
acacaagacaatgttaaacaacctg

SEQ ID NO: 273304 - DNA, 25 bp, Probe sequence
acaacctgcgcattacacatacggc

SEQ ID NO: 273305 - DNA, 25 bp, Probe sequence
acaagacaatgttaaacaacctgcg

SEQ ID NO: 273306 - DNA, 25 bp, Probe sequence
acaatgttaaacaacctgcgcatta

SEQ ID NO: 273307 - DNA, 25 bp, Probe sequence
aaacaacctgcgcattacacatacg

SEQ ID NO: 273308 - DNA, 25 bp, Probe sequence
aacacaagacaatgttaaacaacct

SEQ ID NO: 273309 - DNA, 25 bp, Probe sequence
aacaacctgcgcattacacatacgg

SEQ ID NO: 273310 - DNA, 25 bp, Probe sequence
aacctgcgcattacacatacggcga

SEQ ID NO: 273311 - DNA, 25 bp, Probe sequence
aagacaatgttaaacaacctgcgca

SEQ ID NO: 273312 - DNA, 25 bp, Probe sequence
aatgttaaacaacctgcgcattaca

SEQ ID NO: 273313 - DNA, 25 bp, Probe sequence
caatgttaaacaacctgcgcattac

SEQ ID NO: 273314 - DNA, 25 bp, Probe sequence
caagacaatgttaaacaacctgcgc

SEQ ID NO: 273315 - DNA, 25 bp, Probe sequence
caacctgcgcattacacatacggcg

SEQ ID NO: 273316 - DNA, 25 bp, Probe sequence
cacaagacaatgttaaacaacctgc

SEQ ID NO: 273317 - DNA, 25 bp, Probe sequence
gaaacacaagacaatgttaaacaac

SEQ ID NO: 273318 - DNA, 25 bp, Probe sequence
gacaatgttaaacaacctgcgcatt

SEQ ID NO: 273319 - DNA, 25 bp, Probe sequence
gatttcatcgaacaagttacggcac

SEQ ID NO: 273320 - DNA, 25 bp, Probe sequence
gttaaacaacctgcgcattacacat

SEQ ID NO: 273321 - DNA, 25 bp, Probe sequence
tgttaaacaacctgcgcattacaca

SEQ ID NO: 273322 - DNA, 25 bp, Probe sequence
taaacaacctgcgcattacacatac

SEQ ID NO: 273323 - DNA, 25 bp, Probe sequence
tagatttcatcgaacaagttacggc

SEQ ID NO: 273324 - DNA, 25 bp, Probe sequence
tatagatttcatcgaacaagttacg

SEQ ID NO: 273325 - DNA, 25 bp, Probe sequence
ttatagatttcatcgaacaagttac

SEQ ID NO: 273326 - DNA, 25 bp, Probe sequence
ttaaacaacctgcgcattacacata

SEQ ID NO: 273327 - DNA, 25 bp, Probe sequence
atttcatcaacaacaccattgaaga

SEQ ID NO: 273328 - DNA, 25 bp, Probe sequence
atatgccttggttgatggttatgaa

SEQ ID NO: 273329 - DNA, 25 bp, Probe sequence
ataataacttatatgccttggttga

SEQ ID NO: 273330 - DNA, 25 bp, Probe sequence
ataacttatatgccttggttgatgg

SEQ ID NO: 273331 - DNA, 25 bp, Probe sequence
atgccttggttgatggttatgaatt

SEQ ID NO: 273332 - DNA, 25 bp, Probe sequence
actactatgacgaagaaggtaatag

SEQ ID NO: 273333 - DNA, 25 bp, Probe sequence
acttatatgccttggttgatggtta

SEQ ID NO: 273334 - DNA, 25 bp, Probe sequence
acaacaccattgaagaaataccata

SEQ ID NO: 273335 - DNA, 25 bp, Probe sequence
aaataataacttatatgccttggtt

SEQ ID NO: 273336 - DNA, 25 bp, Probe sequence
aacaacaccattgaagaaataccat

SEQ ID NO: 273337 - DNA, 25 bp, Probe sequence
aacttatatgccttggttgatggtt

SEQ ID NO: 273338 - DNA, 25 bp, Probe sequence
aataacttatatgccttggttgatg

SEQ ID NO: 273339 - DNA, 25 bp, Probe sequence
aataataacttatatgccttggttg

SEQ ID NO: 273340 - DNA, 25 bp, Probe sequence
caacaacaccattgaagaaatacca

SEQ ID NO: 273341 - DNA, 25 bp, Probe sequence
caacaccattgaagaaataccatac

SEQ ID NO: 273342 - DNA, 25 bp, Probe sequence
catcaacaacaccattgaagaaata

SEQ ID NO: 273343 - DNA, 25 bp, Probe sequence
cttatatgccttggttgatggttat

SEQ ID NO: 273344 - DNA, 25 bp, Probe sequence
ccttggttgatggttatgaatttaa

SEQ ID NO: 273345 - DNA, 25 bp, Probe sequence
gccttggttgatggttatgaattta

SEQ ID NO: 273346 - DNA, 25 bp, Probe sequence
gttgatggttatgaatttaagttag

SEQ ID NO: 273347 - DNA, 25 bp, Probe sequence
ggttgatggttatgaatttaagtta

SEQ ID NO: 273348 - DNA, 25 bp, Probe sequence
tgatggttatgaatttaagttagat

SEQ ID NO: 273349 - DNA, 25 bp, Probe sequence
tgccttggttgatggttatgaattt

SEQ ID NO: 273350 - DNA, 25 bp, Probe sequence
tcatcaacaacaccattgaagaaat

SEQ ID NO: 273351 - DNA, 25 bp, Probe sequence
taataacttatatgccttggttgat

SEQ ID NO: 273352 - DNA, 25 bp, Probe sequence
taacttatatgccttggttgatggt

SEQ ID NO: 273353 - DNA, 25 bp, Probe sequence
taaataataacttatatgccttggt

SEQ ID NO: 273354 - DNA, 25 bp, Probe sequence
tatgccttggttgatggttatgaat

SEQ ID NO: 273355 - DNA, 25 bp, Probe sequence
tatatgccttggttgatggttatga

SEQ ID NO: 273356 - DNA, 25 bp, Probe sequence
tttcatcaacaacaccattgaagaa

SEQ ID NO: 273357 - DNA, 25 bp, Probe sequence
ttatatgccttggttgatggttatg

SEQ ID NO: 273358 - DNA, 25 bp, Probe sequence
ttcaaattaatgacggatatgaact

SEQ ID NO: 273359 - DNA, 25 bp, Probe sequence
ttcatcaacaacaccattgaagaaa

SEQ ID NO: 273360 - DNA, 25 bp, Probe sequence
ttggttgatggttatgaatttaagt

SEQ ID NO: 273361 - DNA, 25 bp, Probe sequence
attaactcttagtctgttttcagga

SEQ ID NO: 273362 - DNA, 25 bp, Probe sequence
atacttactatgctctatccaataa

SEQ ID NO: 273363 - DNA, 25 bp, Probe sequence
atcagctatttcaaaaattaacttt

SEQ ID NO: 273364 - DNA, 25 bp, Probe sequence
atccaataagaatttggtgtatttc

SEQ ID NO: 273365 - DNA, 25 bp, Probe sequence
aggacaaaacaacgtaaatcagcta

SEQ ID NO: 273366 - DNA, 25 bp, Probe sequence
actgggataccaggattttatactt

SEQ ID NO: 273367 - DNA, 25 bp, Probe sequence
acttttacaaaaacattgtctgcac

SEQ ID NO: 273368 - DNA, 25 bp, Probe sequence
acaatgattcatatttagattttga

SEQ ID NO: 273369 - DNA, 25 bp, Probe sequence
aaagttattctcgctttcttttctg

SEQ ID NO: 273370 - DNA, 25 bp, Probe sequence
aaaaacattgtctgcactaatagta

SEQ ID NO: 273371 - DNA, 25 bp, Probe sequence
aaaaggattccttgataactattca

SEQ ID NO: 273372 - DNA, 25 bp, Probe sequence
aacaacgtaaatcagctatttcaaa

SEQ ID NO: 273373 - DNA, 25 bp, Probe sequence
aacacaatcgaaatatattacttga

SEQ ID NO: 273374 - DNA, 25 bp, Probe sequence
aacattgtctgcactaatagtaagt

SEQ ID NO: 273375 - DNA, 25 bp, Probe sequence
aactcttagtctgttttcaggacaa

SEQ ID NO: 273376 - DNA, 25 bp, Probe sequence
aagatttcgaaggtaacataattga

SEQ ID NO: 273377 - DNA, 25 bp, Probe sequence
aatcatcatattaacagaattcgtg

SEQ ID NO: 273378 - DNA, 25 bp, Probe sequence
caatatttttagtaatcataaccgt

SEQ ID NO: 273379 - DNA, 25 bp, Probe sequence
ctcttagtctgttttcaggacaaaa

SEQ ID NO: 273380 - DNA, 25 bp, Probe sequence
gctttcttttctgtagtttctgttt

SEQ ID NO: 273381 - DNA, 25 bp, Probe sequence
gaaatatattacttgatactagatt

SEQ ID NO: 273382 - DNA, 25 bp, Probe sequence
gatactagatttaatgctaattacg

SEQ ID NO: 273383 - DNA, 25 bp, Probe sequence
ggattccttgataactattcaagaa

SEQ ID NO: 273384 - DNA, 25 bp, Probe sequence
ggataccaggattttatacttacta

SEQ ID NO: 273385 - DNA, 25 bp, Probe sequence
tgttcataactgtaaaagatttcga

SEQ ID NO: 273386 - DNA, 25 bp, Probe sequence
tcgctttcttttctgtagtttctgt

SEQ ID NO: 273387 - DNA, 25 bp, Probe sequence
tcttttctgtagtttctgtttttat

SEQ ID NO: 273388 - DNA, 25 bp, Probe sequence
tactatgctctatccaataagaatt

SEQ ID NO: 273389 - DNA, 25 bp, Probe sequence
tacctgtacatctattaaagtatga

SEQ ID NO: 273390 - DNA, 25 bp, Probe sequence
tagtaatcataaccgtaaaagtaat

SEQ ID NO: 273391 - DNA, 25 bp, Probe sequence
tatttttttattaactcttagtctg

SEQ ID NO: 273392 - DNA, 25 bp, Probe sequence
tattaacagaattcgtgtatacaaa

SEQ ID NO: 273393 - DNA, 25 bp, Probe sequence
ttttatacttactatgctctatcca

SEQ ID NO: 273394 - DNA, 25 bp, Probe sequence
ttatacttactatgctctatccaat

SEQ ID NO: 273395 - DNA, 25 bp, Probe sequence
attggaatagtacattaagatggcc

SEQ ID NO: 273396 - DNA, 25 bp, Probe sequence
attggtctggtgaaaaccatgtaga

SEQ ID NO: 273397 - DNA, 25 bp, Probe sequence
attatcagcattatatgaagttgat

SEQ ID NO: 273398 - DNA, 25 bp, Probe sequence
atcagcattatatgaagttgattgg

SEQ ID NO: 273399 - DNA, 25 bp, Probe sequence
atggttattggaatagtacattaag

SEQ ID NO: 273400 - DNA, 25 bp, Probe sequence
aaattatcagcattatatgaagttg

SEQ ID NO: 273401 - DNA, 25 bp, Probe sequence
aaatggttattggaatagtacatta

SEQ ID NO: 273402 - DNA, 25 bp, Probe sequence
aaaaattatcagcattatatgaagt

SEQ ID NO: 273403 - DNA, 25 bp, Probe sequence
aaaattatcagcattatatgaagtt

SEQ ID NO: 273404 - DNA, 25 bp, Probe sequence
aatggttattggaatagtacattaa

SEQ ID NO: 273405 - DNA, 25 bp, Probe sequence
aattatcagcattatatgaagttga

SEQ ID NO: 273406 - DNA, 25 bp, Probe sequence
caagagaagttaaatatacgtatgg

SEQ ID NO: 273407 - DNA, 25 bp, Probe sequence
caaatggttattggaatagtacatt

SEQ ID NO: 273408 - DNA, 25 bp, Probe sequence
ctattggtctggtgaaaaccatgta

SEQ ID NO: 273409 - DNA, 25 bp, Probe sequence
ctggggctattggtctggtgaaaac

SEQ ID NO: 273410 - DNA, 25 bp, Probe sequence
gctattggtctggtgaaaaccatgt

SEQ ID NO: 273411 - DNA, 25 bp, Probe sequence
gaaaaattatcagcattatatgaag

SEQ ID NO: 273412 - DNA, 25 bp, Probe sequence
gttattggaatagtacattaagatg

SEQ ID NO: 273413 - DNA, 25 bp, Probe sequence
gggctattggtctggtgaaaaccat

SEQ ID NO: 273414 - DNA, 25 bp, Probe sequence
ggggctattggtctggtgaaaacca

SEQ ID NO: 273415 - DNA, 25 bp, Probe sequence
ggttattggaatagtacattaagat

SEQ ID NO: 273416 - DNA, 25 bp, Probe sequence
ggaatagtacattaagatggcctgg

SEQ ID NO: 273417 - DNA, 25 bp, Probe sequence
ggctattggtctggtgaaaaccatg

SEQ ID NO: 273418 - DNA, 25 bp, Probe sequence
tggaatagtacattaagatggcctg

SEQ ID NO: 273419 - DNA, 25 bp, Probe sequence
tggggctattggtctggtgaaaacc

SEQ ID NO: 273420 - DNA, 25 bp, Probe sequence
tctggggctattggtctggtgaaaa

SEQ ID NO: 273421 - DNA, 25 bp, Probe sequence
ttggaatagtacattaagatggcct

SEQ ID NO: 273422 - DNA, 25 bp, Probe sequence
tatcagcattatatgaagttgattg

SEQ ID NO: 273423 - DNA, 25 bp, Probe sequence
tttctggggctattggtctggtgaa

SEQ ID NO: 273424 - DNA, 25 bp, Probe sequence
tattggtctggtgaaaaccatgtag

SEQ ID NO: 273425 - DNA, 25 bp, Probe sequence
tattggaatagtacattaagatggc

SEQ ID NO: 273426 - DNA, 25 bp, Probe sequence
ttatcagcattatatgaagttgatt

SEQ ID NO: 273427 - DNA, 25 bp, Probe sequence
ttctggggctattggtctggtgaaa

SEQ ID NO: 273428 - DNA, 25 bp, Probe sequence
ttggtctggtgaaaaccatgtagat

SEQ ID NO: 273429 - DNA, 25 bp, Probe sequence
attgatgtattttgatgagagtgta

SEQ ID NO: 273430 - DNA, 25 bp, Probe sequence
atcctcacaacctgtttttaaatat

SEQ ID NO: 273431 - DNA, 25 bp, Probe sequence
atgtgatgacatgtctcaaattgga

SEQ ID NO: 273432 - DNA, 25 bp, Probe sequence
aaaaatatttgatggtttagatgat

SEQ ID NO: 273433 - DNA, 25 bp, Probe sequence
aaccaataataaaagacgcactatc

SEQ ID NO: 273434 - DNA, 25 bp, Probe sequence
aatgttaattcctttgatagctcga

SEQ ID NO: 273435 - DNA, 25 bp, Probe sequence
aattcccgaatcaatgttaattcct

SEQ ID NO: 273436 - DNA, 25 bp, Probe sequence
aattcctttgatagctcgagcaaaa

SEQ ID NO: 273437 - DNA, 25 bp, Probe sequence
catttgcgattgaattttgctcaaa

SEQ ID NO: 273438 - DNA, 25 bp, Probe sequence
cctcacaacctgtttttaaatatgg

SEQ ID NO: 273439 - DNA, 25 bp, Probe sequence
gaaggtgtattgatgtattttgatg

SEQ ID NO: 273440 - DNA, 25 bp, Probe sequence
gacatgtctcaaattggaattagta

SEQ ID NO: 273441 - DNA, 25 bp, Probe sequence
gacatttgcgattgaattttgctca

SEQ ID NO: 273442 - DNA, 25 bp, Probe sequence
gatgacatgtctcaaattggaatta

SEQ ID NO: 273443 - DNA, 25 bp, Probe sequence
gatcataatttgacatttgcgattg

SEQ ID NO: 273444 - DNA, 25 bp, Probe sequence
gatacaaggtttcaaagatttaata

SEQ ID NO: 273445 - DNA, 25 bp, Probe sequence
gatagctcgagcaaaagagtacgaa

SEQ ID NO: 273446 - DNA, 25 bp, Probe sequence
gttaattcctttgatagctcgagca

SEQ ID NO: 273447 - DNA, 25 bp, Probe sequence
gttacatgtgatgacatgtctcaaa

SEQ ID NO: 273448 - DNA, 25 bp, Probe sequence
gtattttgatgagagtgtaatgact

SEQ ID NO: 273449 - DNA, 25 bp, Probe sequence
gtctcaaattggaattagtatacgt

SEQ ID NO: 273450 - DNA, 25 bp, Probe sequence
gtggcttagatacaaggtttcaaag

SEQ ID NO: 273451 - DNA, 25 bp, Probe sequence
ggtgtattgatgtattttgatgaga

SEQ ID NO: 273452 - DNA, 25 bp, Probe sequence
ggttgtggcttagatacaaggtttc

SEQ ID NO: 273453 - DNA, 25 bp, Probe sequence
ggagatcataatttgacatttgcga

SEQ ID NO: 273454 - DNA, 25 bp, Probe sequence
tggaattcccgaatcaatgttaatt

SEQ ID NO: 273455 - DNA, 25 bp, Probe sequence
tgttaattcctttgatagctcgagc

SEQ ID NO: 273456 - DNA, 25 bp, Probe sequence
tgacatttgcgattgaattttgctc

SEQ ID NO: 273457 - DNA, 25 bp, Probe sequence
tcccgaatcaatgttaattcctttg

SEQ ID NO: 273458 - DNA, 25 bp, Probe sequence
tcaatataggttgtggcttagatac

SEQ ID NO: 273459 - DNA, 25 bp, Probe sequence
ttatcctcacaacctgtttttaaat

SEQ ID NO: 273460 - DNA, 25 bp, Probe sequence
ttaattcctttgatagctcgagcaa

SEQ ID NO: 273461 - DNA, 25 bp, Probe sequence
ttcctttgatagctcgagcaaaaga

SEQ ID NO: 273462 - DNA, 25 bp, Probe sequence
ttgcgattgaattttgctcaaaaac

SEQ ID NO: 273463 - DNA, 25 bp, Probe sequence
attcgtaggtgcactttacttctta

SEQ ID NO: 273464 - DNA, 25 bp, Probe sequence
atttagtcatgattccattaacatt

SEQ ID NO: 273465 - DNA, 25 bp, Probe sequence
ataatgtacgtatgccaaggatgat

SEQ ID NO: 273466 - DNA, 25 bp, Probe sequence
atcattcgtaggtgcactttacttc

SEQ ID NO: 273467 - DNA, 25 bp, Probe sequence
aggtgcactttacttcttatttata

SEQ ID NO: 273468 - DNA, 25 bp, Probe sequence
agcggtatctggtttgttaatgcaa

SEQ ID NO: 273469 - DNA, 25 bp, Probe sequence
actactatcagatgtattaagtcgt

SEQ ID NO: 273470 - DNA, 25 bp, Probe sequence
acatcattcgtaggtgcactttact

SEQ ID NO: 273471 - DNA, 25 bp, Probe sequence
aaagacgcacaacactcacgtatat

SEQ ID NO: 273472 - DNA, 25 bp, Probe sequence
aaagaaaaagacgcacaacactcac

SEQ ID NO: 273473 - DNA, 25 bp, Probe sequence
aagtagccaatctgccatagatcat

SEQ ID NO: 273474 - DNA, 25 bp, Probe sequence
aaggatgattgcagggttatttatt

SEQ ID NO: 273475 - DNA, 25 bp, Probe sequence
aatgtacgtatgccaaggatgattg

SEQ ID NO: 273476 - DNA, 25 bp, Probe sequence
cattcgtaggtgcactttacttctt

SEQ ID NO: 273477 - DNA, 25 bp, Probe sequence
ctatcagatgtattaagtcgtttaa

SEQ ID NO: 273478 - DNA, 25 bp, Probe sequence
gccaatctgccatagatcataaaag

SEQ ID NO: 273479 - DNA, 25 bp, Probe sequence
gcactttacttcttatttataacga

SEQ ID NO: 273480 - DNA, 25 bp, Probe sequence
gaaaaagacgcacaacactcacgta

SEQ ID NO: 273481 - DNA, 25 bp, Probe sequence
gattgcagggttatttattggcggt

SEQ ID NO: 273482 - DNA, 25 bp, Probe sequence
gtatctggtttgttaatgcaagcaa

SEQ ID NO: 273483 - DNA, 25 bp, Probe sequence
gtatgccaaggatgattgcagggtt

SEQ ID NO: 273484 - DNA, 25 bp, Probe sequence
gtaggtgcactttacttcttattta

SEQ ID NO: 273485 - DNA, 25 bp, Probe sequence
gtagccaatctgccatagatcataa

SEQ ID NO: 273486 - DNA, 25 bp, Probe sequence
gtacgtatgccaaggatgattgcag

SEQ ID NO: 273487 - DNA, 25 bp, Probe sequence
gtcatgattccattaacatttatta

SEQ ID NO: 273488 - DNA, 25 bp, Probe sequence
gtgcactttacttcttatttataac

SEQ ID NO: 273489 - DNA, 25 bp, Probe sequence
ggttcattatccagtatgaagtggg

SEQ ID NO: 273490 - DNA, 25 bp, Probe sequence
tgtgagtaagaattatttagtcatg

SEQ ID NO: 273491 - DNA, 25 bp, Probe sequence
tcgtaggtgcactttacttcttatt

SEQ ID NO: 273492 - DNA, 25 bp, Probe sequence
taacatttattataggtgcagattt

SEQ ID NO: 273493 - DNA, 25 bp, Probe sequence
tacttcttatttataacgattaaag

SEQ ID NO: 273494 - DNA, 25 bp, Probe sequence
taggtgcactttacttcttatttat

SEQ ID NO: 273495 - DNA, 25 bp, Probe sequence
ttagcggtatctggtttgttaatgc

SEQ ID NO: 273496 - DNA, 25 bp, Probe sequence
ttgcagggttatttattggcggtgc

SEQ ID NO: 273497 - DNA, 25 bp, Probe sequence
aggttttgcaggtggcggtgcgact

SEQ ID NO: 273498 - DNA, 25 bp, Probe sequence
agcctgagtcaacacgtacgcaaat

SEQ ID NO: 273499 - DNA, 25 bp, Probe sequence
acgtacgcaaatcgatcaaatcatc

SEQ ID NO: 273500 - DNA, 25 bp, Probe sequence
acatggtcatcaacatcggcgcatt

SEQ ID NO: 273501 - DNA, 25 bp, Probe sequence
aaaagcatcaggtggcgtacgtaat

SEQ ID NO: 273502 - DNA, 25 bp, Probe sequence
aacttcaacaggttttgcaggtggc

SEQ ID NO: 273503 - DNA, 25 bp, Probe sequence
aagtgattattgagacggtattgtt

SEQ ID NO: 273504 - DNA, 25 bp, Probe sequence
aatcatcgatgaagcgaaagcatac

SEQ ID NO: 273505 - DNA, 25 bp, Probe sequence
caggtggcgtacgtaatttagaaga

SEQ ID NO: 273506 - DNA, 25 bp, Probe sequence
catcaacatcggcgcattaaaagat

SEQ ID NO: 273507 - DNA, 25 bp, Probe sequence
cggtattgttggaccatgacgaaat

SEQ ID NO: 273508 - DNA, 25 bp, Probe sequence
cgttttgatgatgtacaacaagaca

SEQ ID NO: 273509 - DNA, 25 bp, Probe sequence
cgacacgtattggtgcgagcgcagg

SEQ ID NO: 273510 - DNA, 25 bp, Probe sequence
gcggacttcgttaaaacttcaacag

SEQ ID NO: 273511 - DNA, 25 bp, Probe sequence
gcatcaggtggcgtacgtaatttag

SEQ ID NO: 273512 - DNA, 25 bp, Probe sequence
gcaggtggcggtgcgactgcagaag

SEQ ID NO: 273513 - DNA, 25 bp, Probe sequence
gaagtaaaagcatcaggtggcgtac

SEQ ID NO: 273514 - DNA, 25 bp, Probe sequence
gagacggtattgttggaccatgacg

SEQ ID NO: 273515 - DNA, 25 bp, Probe sequence
gagtcaacacgtacgcaaatcgatc

SEQ ID NO: 273516 - DNA, 25 bp, Probe sequence
gatcacactttattgaagcctgagt

SEQ ID NO: 273517 - DNA, 25 bp, Probe sequence
gttcaaattatgcaaggtttagaag

SEQ ID NO: 273518 - DNA, 25 bp, Probe sequence
gtcaacacgtacgcaaatcgatcaa

SEQ ID NO: 273519 - DNA, 25 bp, Probe sequence
gtgcgactgcagaagacgttaaatt

SEQ ID NO: 273520 - DNA, 25 bp, Probe sequence
ggtgcgacacgtattggtgcgagcg

SEQ ID NO: 273521 - DNA, 25 bp, Probe sequence
ggtgcagatgaaattgacatggtca

SEQ ID NO: 273522 - DNA, 25 bp, Probe sequence
ggtttagaagcagattcagattact

SEQ ID NO: 273523 - DNA, 25 bp, Probe sequence
ggctggtgcggacttcgttaaaact

SEQ ID NO: 273524 - DNA, 25 bp, Probe sequence
ggcggtgcgactgcagaagacgtta

SEQ ID NO: 273525 - DNA, 25 bp, Probe sequence
tggtgcggacttcgttaaaacttca

SEQ ID NO: 273526 - DNA, 25 bp, Probe sequence
tggtcatcaacatcggcgcattaaa

SEQ ID NO: 273527 - DNA, 25 bp, Probe sequence
tgaagcctgagtcaacacgtacgca

SEQ ID NO: 273528 - DNA, 25 bp, Probe sequence
tgacatggtcatcaacatcggcgca

SEQ ID NO: 273529 - DNA, 25 bp, Probe sequence
tacaacaagacattgaagcagtggt

SEQ ID NO: 273530 - DNA, 25 bp, Probe sequence
ttaaatctgtatgtgtgaatccaac

SEQ ID NO: 273531 - DNA, 25 bp, Probe sequence
attcacttatgagttacctaaagat

SEQ ID NO: 273532 - DNA, 25 bp, Probe sequence
atttatcgtcacataatgcgcgtaa

SEQ ID NO: 273533 - DNA, 25 bp, Probe sequence
atcgtcacataatgcgcgtaaatac

SEQ ID NO: 273534 - DNA, 25 bp, Probe sequence
agtggtaatcaaccattcacttatg

SEQ ID NO: 273535 - DNA, 25 bp, Probe sequence
agatttatcgtcacataatgcgcgt

SEQ ID NO: 273536 - DNA, 25 bp, Probe sequence
agacgtctatttcagcagtgtttga

SEQ ID NO: 273537 - DNA, 25 bp, Probe sequence
accattcacttatgagttacctaaa

SEQ ID NO: 273538 - DNA, 25 bp, Probe sequence
aaagacgtctatttcagcagtgttt

SEQ ID NO: 273539 - DNA, 25 bp, Probe sequence
aaagatttatcgtcacataatgcgc

SEQ ID NO: 273540 - DNA, 25 bp, Probe sequence
aaaagacgtctatttcagcagtgtt

SEQ ID NO: 273541 - DNA, 25 bp, Probe sequence
aactagtggtaatcaaccattcact

SEQ ID NO: 273542 - DNA, 25 bp, Probe sequence
aaccattcacttatgagttacctaa

SEQ ID NO: 273543 - DNA, 25 bp, Probe sequence
aagacgtctatttcagcagtgtttg

SEQ ID NO: 273544 - DNA, 25 bp, Probe sequence
aatcaaccattcacttatgagttac

SEQ ID NO: 273545 - DNA, 25 bp, Probe sequence
caaccattcacttatgagttaccta

SEQ ID NO: 273546 - DNA, 25 bp, Probe sequence
cagcagtgtttgaaaggaagtttat

SEQ ID NO: 273547 - DNA, 25 bp, Probe sequence
ctagtggtaatcaaccattcactta

SEQ ID NO: 273548 - DNA, 25 bp, Probe sequence
cgtcacataatgcgcgtaaatactt

SEQ ID NO: 273549 - DNA, 25 bp, Probe sequence
gagttacctaaagatttatcgtcac

SEQ ID NO: 273550 - DNA, 25 bp, Probe sequence
gacgtctatttcagcagtgtttgaa

SEQ ID NO: 273551 - DNA, 25 bp, Probe sequence
gatttatcgtcacataatgcgcgta

SEQ ID NO: 273552 - DNA, 25 bp, Probe sequence
cacataatgcgcgtaaatacttgga

SEQ ID NO: 273553 - DNA, 25 bp, Probe sequence
gttacctaaagatttatcgtcacat

SEQ ID NO: 273554 - DNA, 25 bp, Probe sequence
gtaaatacttggaatttatttcaca

SEQ ID NO: 273555 - DNA, 25 bp, Probe sequence
gtaatcaaccattcacttatgagtt

SEQ ID NO: 273556 - DNA, 25 bp, Probe sequence
gtcacataatgcgcgtaaatacttg

SEQ ID NO: 273557 - DNA, 25 bp, Probe sequence
gtctatttcagcagtgtttgaaagg

SEQ ID NO: 273558 - DNA, 25 bp, Probe sequence
ggtaatcaaccattcacttatgagt

SEQ ID NO: 273559 - DNA, 25 bp, Probe sequence
tggtaatcaaccattcacttatgag

SEQ ID NO: 273560 - DNA, 25 bp, Probe sequence
tcaaccattcacttatgagttacct

SEQ ID NO: 273561 - DNA, 25 bp, Probe sequence
tcacttatgagttacctaaagattt

SEQ ID NO: 273562 - DNA, 25 bp, Probe sequence
taatgcgcgtaaatacttggaattt

SEQ ID NO: 273563 - DNA, 25 bp, Probe sequence
tttatcgtcacataatgcgcgtaaa

SEQ ID NO: 273564 - DNA, 25 bp, Probe sequence
ttatcgtcacataatgcgcgtaaat

SEQ ID NO: 273565 - DNA, 25 bp, Probe sequence
ataggtaaatcttatgtgaatggta

SEQ ID NO: 273566 - DNA, 25 bp, Probe sequence
ataataggtaaatcttatgtgaatg

SEQ ID NO: 273567 - DNA, 25 bp, Probe sequence
atcttatgtgaatggtaaatatatt

SEQ ID NO: 273568 - DNA, 25 bp, Probe sequence
aggtaaatcttatgtgaatggtaaa

SEQ ID NO: 273569 - DNA, 25 bp, Probe sequence
agttttgtttgatgatgaagggaat

SEQ ID NO: 273570 - DNA, 25 bp, Probe sequence
aaatcttatgtgaatggtaaatata

SEQ ID NO: 273571 - DNA, 25 bp, Probe sequence
aatcttatgtgaatggtaaatatat

SEQ ID NO: 273572 - DNA, 25 bp, Probe sequence
aataggtaaatcttatgtgaatggt

SEQ ID NO: 273573 - DNA, 25 bp, Probe sequence
cagttttgtttgatgatgaagggaa

SEQ ID NO: 273574 - DNA, 25 bp, Probe sequence
ccagttttgtttgatgatgaaggga

SEQ ID NO: 273575 - DNA, 25 bp, Probe sequence
gaatggtaaatatattgaaacgaaa

SEQ ID NO: 273576 - DNA, 25 bp, Probe sequence
gataataggtaaatcttatgtgaat

SEQ ID NO: 273577 - DNA, 25 bp, Probe sequence
gttttgtttgatgatgaagggaatt

SEQ ID NO: 273578 - DNA, 25 bp, Probe sequence
gtaaatcttatgtgaatggtaaata

SEQ ID NO: 273579 - DNA, 25 bp, Probe sequence
gtgaatggtaaatatattgaaacga

SEQ ID NO: 273580 - DNA, 25 bp, Probe sequence
ggtaaatcttatgtgaatggtaaat

SEQ ID NO: 273581 - DNA, 25 bp, Probe sequence
tgaaacgaaattaggtaaggttcat

SEQ ID NO: 273582 - DNA, 25 bp, Probe sequence
tgaatggtaaatatattgaaacgaa

SEQ ID NO: 273583 - DNA, 25 bp, Probe sequence
tccagttttgtttgatgatgaaggg

SEQ ID NO: 273584 - DNA, 25 bp, Probe sequence
tcttatgtgaatggtaaatatattg

SEQ ID NO: 273585 - DNA, 25 bp, Probe sequence
taataggtaaatcttatgtgaatgg

SEQ ID NO: 273586 - DNA, 25 bp, Probe sequence
taaatcttatgtgaatggtaaatat

SEQ ID NO: 273587 - DNA, 25 bp, Probe sequence
taggtaaatcttatgtgaatggtaa

SEQ ID NO: 273588 - DNA, 25 bp, Probe sequence
ttttgtttgatgatgaagggaattt

SEQ ID NO: 273589 - DNA, 25 bp, Probe sequence
ttccagttttgtttgatgatgaagg

SEQ ID NO: 273590 - DNA, 25 bp, Probe sequence
attcaatgcaattttaactttatct

SEQ ID NO: 273591 - DNA, 25 bp, Probe sequence
attaatgcttttttaagttctgaag

SEQ ID NO: 273592 - DNA, 25 bp, Probe sequence
attttaactttatctgtgaataaat

SEQ ID NO: 273593 - DNA, 25 bp, Probe sequence
atgcttttttaagttctgaagaagc

SEQ ID NO: 273594 - DNA, 25 bp, Probe sequence
atgcaattttaactttatctgtgaa

SEQ ID NO: 273595 - DNA, 25 bp, Probe sequence
agaagaaagaacattcccaaataat

SEQ ID NO: 273596 - DNA, 25 bp, Probe sequence
agaattcaatgcaattttaacttta

SEQ ID NO: 273597 - DNA, 25 bp, Probe sequence
acattaatgcttttttaagttctga

SEQ ID NO: 273598 - DNA, 25 bp, Probe sequence
acagctgagactttagagttattag

SEQ ID NO: 273599 - DNA, 25 bp, Probe sequence
aacattaatgcttttttaagttctg

SEQ ID NO: 273600 - DNA, 25 bp, Probe sequence
aagaattcaatgcaattttaacttt

SEQ ID NO: 273601 - DNA, 25 bp, Probe sequence
aagaaagaacattcccaaataatga

SEQ ID NO: 273602 - DNA, 25 bp, Probe sequence
aatgcaattttaactttatctgtga

SEQ ID NO: 273603 - DNA, 25 bp, Probe sequence
aatgcttttttaagttctgaagaag

SEQ ID NO: 273604 - DNA, 25 bp, Probe sequence
aatagaagaaagaacattcccaaat

SEQ ID NO: 273605 - DNA, 25 bp, Probe sequence
caattttaactttatctgtgaataa

SEQ ID NO: 273606 - DNA, 25 bp, Probe sequence
caatgcaattttaactttatctgtg

SEQ ID NO: 273607 - DNA, 25 bp, Probe sequence
cattaatgcttttttaagttctgaa

SEQ ID NO: 273608 - DNA, 25 bp, Probe sequence
gcttttttaagttctgaagaagcta

SEQ ID NO: 273609 - DNA, 25 bp, Probe sequence
gcaattttaactttatctgtgaata

SEQ ID NO: 273610 - DNA, 25 bp, Probe sequence
gaattcaatgcaattttaactttat

SEQ ID NO: 273611 - DNA, 25 bp, Probe sequence
gaagaattcaatgcaattttaactt

SEQ ID NO: 273612 - DNA, 25 bp, Probe sequence
tgaagaagctacaaatttaaaatta

SEQ ID NO: 273613 - DNA, 25 bp, Probe sequence
tgcaattttaactttatctgtgaat

SEQ ID NO: 273614 - DNA, 25 bp, Probe sequence
tctgaagaagctacaaatttaaaat

SEQ ID NO: 273615 - DNA, 25 bp, Probe sequence
tcaatgcaattttaactttatctgt

SEQ ID NO: 273616 - DNA, 25 bp, Probe sequence
taatgcttttttaagttctgaagaa

SEQ ID NO: 273617 - DNA, 25 bp, Probe sequence
tacagctgagactttagagttatta

SEQ ID NO: 273618 - DNA, 25 bp, Probe sequence
tttacagctgagactttagagttat

SEQ ID NO: 273619 - DNA, 25 bp, Probe sequence
tttttaagttctgaagaagctacaa

SEQ ID NO: 273620 - DNA, 25 bp, Probe sequence
ttttacagctgagactttagagtta

SEQ ID NO: 273621 - DNA, 25 bp, Probe sequence
ttacagctgagactttagagttatt

SEQ ID NO: 273622 - DNA, 25 bp, Probe sequence
ttaatgcttttttaagttctgaaga

SEQ ID NO: 273623 - DNA, 25 bp, Probe sequence
ttcaatgcaattttaactttatctg

SEQ ID NO: 273624 - DNA, 25 bp, Probe sequence
aatttttaggttctgaagaagctgc

SEQ ID NO: 273625 - DNA, 25 bp, Probe sequence
attaactctatctgtaaataaataa

SEQ ID NO: 273626 - DNA, 25 bp, Probe sequence
atttttaggttctgaagaagctgca

SEQ ID NO: 273627 - DNA, 25 bp, Probe sequence
atattaactctatctgtaaataaat

SEQ ID NO: 273628 - DNA, 25 bp, Probe sequence
atgcaatattaactctatctgtaaa

SEQ ID NO: 273629 - DNA, 25 bp, Probe sequence
aggttctgaagaagctgcaaatttg

SEQ ID NO: 273630 - DNA, 25 bp, Probe sequence
acatctgagactttagaattattag

SEQ ID NO: 273631 - DNA, 25 bp, Probe sequence
aagaagctgcaaatttgaaattagt

SEQ ID NO: 273632 - DNA, 25 bp, Probe sequence
aatgcaatattaactctatctgtaa

SEQ ID NO: 273633 - DNA, 25 bp, Probe sequence
aatattaactctatctgtaaataaa

SEQ ID NO: 273634 - DNA, 25 bp, Probe sequence
caatattaactctatctgtaaataa

SEQ ID NO: 273635 - DNA, 25 bp, Probe sequence
ctgaagaagctgcaaatttgaaatt

SEQ ID NO: 273636 - DNA, 25 bp, Probe sequence
cgaatttttaggttctgaagaagct

SEQ ID NO: 273637 - DNA, 25 bp, Probe sequence
gcaatattaactctatctgtaaata

SEQ ID NO: 273638 - DNA, 25 bp, Probe sequence
gaatttttaggttctgaagaagctg

SEQ ID NO: 273639 - DNA, 25 bp, Probe sequence
gaatcaaatattaacgaatttttag

SEQ ID NO: 273640 - DNA, 25 bp, Probe sequence
gaagaagctgcaaatttgaaattag

SEQ ID NO: 273641 - DNA, 25 bp, Probe sequence
gaagctgcaaatttgaaattagtaa

SEQ ID NO: 273642 - DNA, 25 bp, Probe sequence
gaggaaagaacatttccaaataatg

SEQ ID NO: 273643 - DNA, 25 bp, Probe sequence
gttctgaagaagctgcaaatttgaa

SEQ ID NO: 273644 - DNA, 25 bp, Probe sequence
ggttctgaagaagctgcaaatttga

SEQ ID NO: 273645 - DNA, 25 bp, Probe sequence
tgcaatattaactctatctgtaaat

SEQ ID NO: 273646 - DNA, 25 bp, Probe sequence
tctgaagaagctgcaaatttgaaat

SEQ ID NO: 273647 - DNA, 25 bp, Probe sequence
taatgcaatattaactctatctgta

SEQ ID NO: 273648 - DNA, 25 bp, Probe sequence
tacatctgagactttagaattatta

SEQ ID NO: 273649 - DNA, 25 bp, Probe sequence
taggttctgaagaagctgcaaattt

SEQ ID NO: 273650 - DNA, 25 bp, Probe sequence
tttacatctgagactttagaattat

SEQ ID NO: 273651 - DNA, 25 bp, Probe sequence
tttaggttctgaagaagctgcaaat

SEQ ID NO: 273652 - DNA, 25 bp, Probe sequence
tttttaggttctgaagaagctgcaa

SEQ ID NO: 273653 - DNA, 25 bp, Probe sequence
ttttaggttctgaagaagctgcaaa

SEQ ID NO: 273654 - DNA, 25 bp, Probe sequence
ttttacatctgagactttagaatta

SEQ ID NO: 273655 - DNA, 25 bp, Probe sequence
ttaggttctgaagaagctgcaaatt

SEQ ID NO: 273656 - DNA, 25 bp, Probe sequence
ttacatctgagactttagaattatt

SEQ ID NO: 273657 - DNA, 25 bp, Probe sequence
ttctgaagaagctgcaaatttgaaa

SEQ ID NO: 273658 - DNA, 25 bp, Probe sequence
atttgaacgaattattacagcgtct

SEQ ID NO: 273659 - DNA, 25 bp, Probe sequence
atcagagattaaaagcacttgaagt

SEQ ID NO: 273660 - DNA, 25 bp, Probe sequence
agatttgaacgaattattacagcgt

SEQ ID NO: 273661 - DNA, 25 bp, Probe sequence
agagattaaaagcacttgaagtgtt

SEQ ID NO: 273662 - DNA, 25 bp, Probe sequence
aaatgtagatttgaacgaattatta

SEQ ID NO: 273663 - DNA, 25 bp, Probe sequence
aaagcacttgaagtgttaacacatg

SEQ ID NO: 273664 - DNA, 25 bp, Probe sequence
aaaagcacttgaagtgttaacacat

SEQ ID NO: 273665 - DNA, 25 bp, Probe sequence
aaaatgtagatttgaacgaattatt

SEQ ID NO: 273666 - DNA, 25 bp, Probe sequence
aagcacttgaagtgttaacacatga

SEQ ID NO: 273667 - DNA, 25 bp, Probe sequence
aatgtagatttgaacgaattattac

SEQ ID NO: 273668 - DNA, 25 bp, Probe sequence
cagagattaaaagcacttgaagtgt

SEQ ID NO: 273669 - DNA, 25 bp, Probe sequence
catgttagagcatatgcaaaaagaa

SEQ ID NO: 273670 - DNA, 25 bp, Probe sequence
gcatgttagagcatatgcaaaaaga

SEQ ID NO: 273671 - DNA, 25 bp, Probe sequence
gagattaaaagcacttgaagtgtta

SEQ ID NO: 273672 - DNA, 25 bp, Probe sequence
gatttgaacgaattattacagcgtc

SEQ ID NO: 273673 - DNA, 25 bp, Probe sequence
gttgaacaaacgaatacaccaggtt

SEQ ID NO: 273674 - DNA, 25 bp, Probe sequence
gattaaaagcacttgaagtgttaac

SEQ ID NO: 273675 - DNA, 25 bp, Probe sequence
gtttatcagagattaaaagcacttg

SEQ ID NO: 273676 - DNA, 25 bp, Probe sequence
gtagatttgaacgaattattacagc

SEQ ID NO: 273677 - DNA, 25 bp, Probe sequence
ggcatgttagagcatatgcaaaaag

SEQ ID NO: 273678 - DNA, 25 bp, Probe sequence
tggcatgttagagcatatgcaaaaa

SEQ ID NO: 273679 - DNA, 25 bp, Probe sequence
tgaacaaacgaatacaccaggttcg

SEQ ID NO: 273680 - DNA, 25 bp, Probe sequence
tgaacgaattattacagcgtctcaa

SEQ ID NO: 273681 - DNA, 25 bp, Probe sequence
tcagagattaaaagcacttgaagtg

SEQ ID NO: 273682 - DNA, 25 bp, Probe sequence
taaaaatttaacaccttatgtgacg

SEQ ID NO: 273683 - DNA, 25 bp, Probe sequence
taaaagcacttgaagtgttaacaca

SEQ ID NO: 273684 - DNA, 25 bp, Probe sequence
tagatttgaacgaattattacagcg

SEQ ID NO: 273685 - DNA, 25 bp, Probe sequence
tatcagagattaaaagcacttgaag

SEQ ID NO: 273686 - DNA, 25 bp, Probe sequence
tttgaacgaattattacagcgtctc

SEQ ID NO: 273687 - DNA, 25 bp, Probe sequence
tttatcagagattaaaagcacttga

SEQ ID NO: 273688 - DNA, 25 bp, Probe sequence
ttatcagagattaaaagcacttgaa

SEQ ID NO: 273689 - DNA, 25 bp, Probe sequence
ttaaaagcacttgaagtgttaacac

SEQ ID NO: 273690 - DNA, 25 bp, Probe sequence
ttgaacaaacgaatacaccaggttc

SEQ ID NO: 273691 - DNA, 25 bp, Probe sequence
ttgaacgaattattacagcgtctca

SEQ ID NO: 273692 - DNA, 25 bp, Probe sequence
atatcgcatcatcaacatctgttat

SEQ ID NO: 273693 - DNA, 25 bp, Probe sequence
atcatttgctacagactatggtgtc

SEQ ID NO: 273694 - DNA, 25 bp, Probe sequence
atgatgataatgtgctgaatcaatc

SEQ ID NO: 273695 - DNA, 25 bp, Probe sequence
aggttatatcgcatcatcaacatct

SEQ ID NO: 273696 - DNA, 25 bp, Probe sequence
agtaccatcctgaatcatttgctac

SEQ ID NO: 273697 - DNA, 25 bp, Probe sequence
agttgtagataattatgattccttt

SEQ ID NO: 273698 - DNA, 25 bp, Probe sequence
accatcctgaatcatttgctacaga

SEQ ID NO: 273699 - DNA, 25 bp, Probe sequence
aaggttatatcgcatcatcaacatc

SEQ ID NO: 273700 - DNA, 25 bp, Probe sequence
cagactatggtgtcaaaataattac

SEQ ID NO: 273701 - DNA, 25 bp, Probe sequence
cagtaccatcctgaatcatttgcta

SEQ ID NO: 273702 - DNA, 25 bp, Probe sequence
catcctgaatcatttgctacagact

SEQ ID NO: 273703 - DNA, 25 bp, Probe sequence
catttgctacagactatggtgtcaa

SEQ ID NO: 273704 - DNA, 25 bp, Probe sequence
ctgaatcatttgctacagactatgg

SEQ ID NO: 273705 - DNA, 25 bp, Probe sequence
cctgatgatgataatgtgctgaatc

SEQ ID NO: 273706 - DNA, 25 bp, Probe sequence
ccatcctgaatcatttgctacagac

SEQ ID NO: 273707 - DNA, 25 bp, Probe sequence
gcatcatcaacatctgttatatcaa

SEQ ID NO: 273708 - DNA, 25 bp, Probe sequence
gaatcatttgctacagactatggtg

SEQ ID NO: 273709 - DNA, 25 bp, Probe sequence
gttatatcgcatcatcaacatctgt

SEQ ID NO: 273710 - DNA, 25 bp, Probe sequence
gtaccatcctgaatcatttgctaca

SEQ ID NO: 273711 - DNA, 25 bp, Probe sequence
gtggagaagtcattaaaggcgacaa

SEQ ID NO: 273712 - DNA, 25 bp, Probe sequence
ggtattcagtaccatcctgaatcat

SEQ ID NO: 273713 - DNA, 25 bp, Probe sequence
ggttatatcgcatcatcaacatctg

SEQ ID NO: 273714 - DNA, 25 bp, Probe sequence
tgctacagactatggtgtcaaaata

SEQ ID NO: 273715 - DNA, 25 bp, Probe sequence
tcctgaatcatttgctacagactat

SEQ ID NO: 273716 - DNA, 25 bp, Probe sequence
tcgcatcatcaacatctgttatatc

SEQ ID NO: 273717 - DNA, 25 bp, Probe sequence
tcagtaccatcctgaatcatttgct

SEQ ID NO: 273718 - DNA, 25 bp, Probe sequence
tcatcaacatctgttatatcaagat

SEQ ID NO: 273719 - DNA, 25 bp, Probe sequence
tacggtggagaagtcattaaaggcg

SEQ ID NO: 273720 - DNA, 25 bp, Probe sequence
taccatcctgaatcatttgctacag

SEQ ID NO: 273721 - DNA, 25 bp, Probe sequence
tatcgcatcatcaacatctgttata

SEQ ID NO: 273722 - DNA, 25 bp, Probe sequence
tatatcgcatcatcaacatctgtta

SEQ ID NO: 273723 - DNA, 25 bp, Probe sequence
tttgctacagactatggtgtcaaaa

SEQ ID NO: 273724 - DNA, 25 bp, Probe sequence
ttatatcgcatcatcaacatctgtt

SEQ ID NO: 273725 - DNA, 25 bp, Probe sequence
ttgtagataattatgattcctttac

SEQ ID NO: 273726 - DNA, 25 bp, Probe sequence
atatgcaaccagttagaaaaatgat

SEQ ID NO: 273727 - DNA, 25 bp, Probe sequence
atgaaaaccatgacattactaacaa

SEQ ID NO: 273728 - DNA, 25 bp, Probe sequence
acttatttctcctagtattggaact

SEQ ID NO: 273729 - DNA, 25 bp, Probe sequence
acaatgtatccacatcaaccatgtt

SEQ ID NO: 273730 - DNA, 25 bp, Probe sequence
aaatatgaattacttagttcctatt

SEQ ID NO: 273731 - DNA, 25 bp, Probe sequence
aaataccatcaaatgagaggtgaat

SEQ ID NO: 273732 - DNA, 25 bp, Probe sequence
aaatgcgactgattatggtttgaaa

SEQ ID NO: 273733 - DNA, 25 bp, Probe sequence
aaaccatgacattactaacaagaat

SEQ ID NO: 273734 - DNA, 25 bp, Probe sequence
aacatatattgtacgtagcttaatt

SEQ ID NO: 273735 - DNA, 25 bp, Probe sequence
aatcgatatacttatttctcctagt

SEQ ID NO: 273736 - DNA, 25 bp, Probe sequence
aatacaatgtatccacatcaaccat

SEQ ID NO: 273737 - DNA, 25 bp, Probe sequence
aattacacattaaatgcgactgatt

SEQ ID NO: 273738 - DNA, 25 bp, Probe sequence
cttagttcctattcggagcgagaaa

SEQ ID NO: 273739 - DNA, 25 bp, Probe sequence
gctaatcgatatacttatttctcct

SEQ ID NO: 273740 - DNA, 25 bp, Probe sequence
gcttttgttgtagcaagtgctggcg

SEQ ID NO: 273741 - DNA, 25 bp, Probe sequence
gcaagtgctggcgtaaaagttataa

SEQ ID NO: 273742 - DNA, 25 bp, Probe sequence
gaattacttagttcctattcggagc

SEQ ID NO: 273743 - DNA, 25 bp, Probe sequence
gaaactatattacttgaaagcgaca

SEQ ID NO: 273744 - DNA, 25 bp, Probe sequence
gaaagcgacattaaagagctaatcg

SEQ ID NO: 273745 - DNA, 25 bp, Probe sequence
gagcgagaaatccaacaacaagaat

SEQ ID NO: 273746 - DNA, 25 bp, Probe sequence
gagctaatcgatatacttatttctc

SEQ ID NO: 273747 - DNA, 25 bp, Probe sequence
gatatacttatttctcctagtattg

SEQ ID NO: 273748 - DNA, 25 bp, Probe sequence
gatatatgaattgactgaagatgga

SEQ ID NO: 273749 - DNA, 25 bp, Probe sequence
gttcctattcggagcgagaaatcca

SEQ ID NO: 273750 - DNA, 25 bp, Probe sequence
gtagcaagtgctggcgtaaaagtta

SEQ ID NO: 273751 - DNA, 25 bp, Probe sequence
gtacgtagcttaattaatacaatgt

SEQ ID NO: 273752 - DNA, 25 bp, Probe sequence
gtgctggcgtaaaagttataaaaca

SEQ ID NO: 273753 - DNA, 25 bp, Probe sequence
tgtatccacatcaaccatgttatga

SEQ ID NO: 273754 - DNA, 25 bp, Probe sequence
tgaatggtaaagatcagtcaagtcg

SEQ ID NO: 273755 - DNA, 25 bp, Probe sequence
tctcctagtattggaactgatatta

SEQ ID NO: 273756 - DNA, 25 bp, Probe sequence
tacttagttcctattcggagcgaga

SEQ ID NO: 273757 - DNA, 25 bp, Probe sequence
tattcggagcgagaaatccaacaac

SEQ ID NO: 273758 - DNA, 25 bp, Probe sequence
tatttctcctagtattggaactgat

SEQ ID NO: 273759 - DNA, 25 bp, Probe sequence
ttcaggtagtacggatttgttaaat

SEQ ID NO: 273760 - DNA, 25 bp, Probe sequence
attatacatatacacatgagttagg

SEQ ID NO: 273761 - DNA, 25 bp, Probe sequence
attttgatgctgcgacgaaaggaaa

SEQ ID NO: 273762 - DNA, 25 bp, Probe sequence
atttatgcactagaacatgcacgtg

SEQ ID NO: 273763 - DNA, 25 bp, Probe sequence
ataaattttgatgctgcgacgaaag

SEQ ID NO: 273764 - DNA, 25 bp, Probe sequence
atgcactagaacatgcacgtgaatt

SEQ ID NO: 273765 - DNA, 25 bp, Probe sequence
agaacatgcacgtgaattaaatgtt

SEQ ID NO: 273766 - DNA, 25 bp, Probe sequence
agcagcattatacatatacacatga

SEQ ID NO: 273767 - DNA, 25 bp, Probe sequence
agcattatacatatacacatgagtt

SEQ ID NO: 273768 - DNA, 25 bp, Probe sequence
actagaacatgcacgtgaattaaat

SEQ ID NO: 273769 - DNA, 25 bp, Probe sequence
aaattttgatgctgcgacgaaagga

SEQ ID NO: 273770 - DNA, 25 bp, Probe sequence
aaataaattttgatgctgcgacgaa

SEQ ID NO: 273771 - DNA, 25 bp, Probe sequence
aaaataaattttgatgctgcgacga

SEQ ID NO: 273772 - DNA, 25 bp, Probe sequence
aataaattttgatgctgcgacgaaa

SEQ ID NO: 273773 - DNA, 25 bp, Probe sequence
aattttgatgctgcgacgaaaggaa

SEQ ID NO: 273774 - DNA, 25 bp, Probe sequence
ctgcgacgaaaggaaatccaggcat

SEQ ID NO: 273775 - DNA, 25 bp, Probe sequence
cgaaaggaaatccaggcataagtac

SEQ ID NO: 273776 - DNA, 25 bp, Probe sequence
gcgacgaaaggaaatccaggcataa

SEQ ID NO: 273777 - DNA, 25 bp, Probe sequence
gctgcgacgaaaggaaatccaggca

SEQ ID NO: 273778 - DNA, 25 bp, Probe sequence
gcagcattatacatatacacatgag

SEQ ID NO: 273779 - DNA, 25 bp, Probe sequence
gcactagaacatgcacgtgaattaa

SEQ ID NO: 273780 - DNA, 25 bp, Probe sequence
gaacaaaacaaagaagcgaatcaac

SEQ ID NO: 273781 - DNA, 25 bp, Probe sequence
gaaaataaattttgatgctgcgacg

SEQ ID NO: 273782 - DNA, 25 bp, Probe sequence
gacgaaaggaaatccaggcataagt

SEQ ID NO: 273783 - DNA, 25 bp, Probe sequence
gagagaacaaaacaaagaagcgaat

SEQ ID NO: 273784 - DNA, 25 bp, Probe sequence
gatgctgcgacgaaaggaaatccag

SEQ ID NO: 273785 - DNA, 25 bp, Probe sequence
gattttgatttattatttgttaaat

SEQ ID NO: 273786 - DNA, 25 bp, Probe sequence
gtatttatgcactagaacatgcacg

SEQ ID NO: 273787 - DNA, 25 bp, Probe sequence
tgatgctgcgacgaaaggaaatcca

SEQ ID NO: 273788 - DNA, 25 bp, Probe sequence
tgctgcgacgaaaggaaatccaggc

SEQ ID NO: 273789 - DNA, 25 bp, Probe sequence
taaattttgatgctgcgacgaaagg

SEQ ID NO: 273790 - DNA, 25 bp, Probe sequence
tatgcactagaacatgcacgtgaat

SEQ ID NO: 273791 - DNA, 25 bp, Probe sequence
ttttgatgctgcgacgaaaggaaat

SEQ ID NO: 273792 - DNA, 25 bp, Probe sequence
ttatgcactagaacatgcacgtgaa

SEQ ID NO: 273793 - DNA, 25 bp, Probe sequence
ttgatgctgcgacgaaaggaaatcc

SEQ ID NO: 273794 - DNA, 25 bp, Probe sequence
atataaacgtatcgctgctaaatca

SEQ ID NO: 273795 - DNA, 25 bp, Probe sequence
atctttcgcagatgtaaccaataca

SEQ ID NO: 273796 - DNA, 25 bp, Probe sequence
atgttatttatgtttatgcgaggtt

SEQ ID NO: 273797 - DNA, 25 bp, Probe sequence
acaaagggaactgagcaatcgccac

SEQ ID NO: 273798 - DNA, 25 bp, Probe sequence
actggttctgttggattattacagg

SEQ ID NO: 273799 - DNA, 25 bp, Probe sequence
acagtccattcgtaaaattattcgc

SEQ ID NO: 273800 - DNA, 25 bp, Probe sequence
aaagggaactgagcaatcgccacat

SEQ ID NO: 273801 - DNA, 25 bp, Probe sequence
aacgtatcgctgctaaatcaaataa

SEQ ID NO: 273802 - DNA, 25 bp, Probe sequence
aatactgaatttaaatctttcgcag

SEQ ID NO: 273803 - DNA, 25 bp, Probe sequence
caagttgatcctgataacagtccat

SEQ ID NO: 273804 - DNA, 25 bp, Probe sequence
catactggttctgttggattattac

SEQ ID NO: 273805 - DNA, 25 bp, Probe sequence
ctttcgcagatgtaaccaatacata

SEQ ID NO: 273806 - DNA, 25 bp, Probe sequence
ctgataacagtccattcgtaaaatt

SEQ ID NO: 273807 - DNA, 25 bp, Probe sequence
gaattttggttctctatcattaaaa

SEQ ID NO: 273808 - DNA, 25 bp, Probe sequence
gacatactggttctgttggattatt

SEQ ID NO: 273809 - DNA, 25 bp, Probe sequence
gatcctgataacagtccattcgtaa

SEQ ID NO: 273810 - DNA, 25 bp, Probe sequence
gttgatcctgataacagtccattcg

SEQ ID NO: 273811 - DNA, 25 bp, Probe sequence
gttatttatgtttatgcgaggttta

SEQ ID NO: 273812 - DNA, 25 bp, Probe sequence
gtttatcaagtcaacaacaagcacc

SEQ ID NO: 273813 - DNA, 25 bp, Probe sequence
gtccattcgtaaaattattcgcatt

SEQ ID NO: 273814 - DNA, 25 bp, Probe sequence
ggttcccagaaattccaaactggat

SEQ ID NO: 273815 - DNA, 25 bp, Probe sequence
ggatttatgttatttatgtttatgc

SEQ ID NO: 273816 - DNA, 25 bp, Probe sequence
tggacatactggttctgttggatta

SEQ ID NO: 273817 - DNA, 25 bp, Probe sequence
tggttcccagaaattccaaactgga

SEQ ID NO: 273818 - DNA, 25 bp, Probe sequence
tgatcctgataacagtccattcgta

SEQ ID NO: 273819 - DNA, 25 bp, Probe sequence
tcctgataacagtccattcgtaaaa

SEQ ID NO: 273820 - DNA, 25 bp, Probe sequence
taagatataaacgtatcgctgctaa

SEQ ID NO: 273821 - DNA, 25 bp, Probe sequence
taaatctttcgcagatgtaaccaat

SEQ ID NO: 273822 - DNA, 25 bp, Probe sequence
taaacgtatcgctgctaaatcaaat

SEQ ID NO: 273823 - DNA, 25 bp, Probe sequence
tactgaatttaaatctttcgcagat

SEQ ID NO: 273824 - DNA, 25 bp, Probe sequence
tatttatgtttatgcgaggtttagg

SEQ ID NO: 273825 - DNA, 25 bp, Probe sequence
tttggttctctatcattaaaatagc

SEQ ID NO: 273826 - DNA, 25 bp, Probe sequence
ttagaattttggttctctatcatta

SEQ ID NO: 273827 - DNA, 25 bp, Probe sequence
ttcggtttatcaagtcaacaacaag

SEQ ID NO: 273828 - DNA, 25 bp, Probe sequence
attccaaacgattactgtcaatcaa

SEQ ID NO: 273829 - DNA, 25 bp, Probe sequence
attattccaaacgattactgtcaat

SEQ ID NO: 273830 - DNA, 25 bp, Probe sequence
atttatgactcgttgattgaaggtt

SEQ ID NO: 273831 - DNA, 25 bp, Probe sequence
atattttatatttatgactcgttga

SEQ ID NO: 273832 - DNA, 25 bp, Probe sequence
atcgatattgacagcgacatcccag

SEQ ID NO: 273833 - DNA, 25 bp, Probe sequence
atcccagataatctcatattttata

SEQ ID NO: 273834 - DNA, 25 bp, Probe sequence
atgactcgttgattgaaggttttat

SEQ ID NO: 273835 - DNA, 25 bp, Probe sequence
agtagcttgctacaattgttagaac

SEQ ID NO: 273836 - DNA, 25 bp, Probe sequence
agagaccgtatcgatattgacagcg

SEQ ID NO: 273837 - DNA, 25 bp, Probe sequence
agcattgtcgagtagcttgctacaa

SEQ ID NO: 273838 - DNA, 25 bp, Probe sequence
agcttgctacaattgttagaacagc

SEQ ID NO: 273839 - DNA, 25 bp, Probe sequence
aaattatgcataacgatatcaaaaa

SEQ ID NO: 273840 - DNA, 25 bp, Probe sequence
aaagtattaaaaaatgtctgcatta

SEQ ID NO: 273841 - DNA, 25 bp, Probe sequence
aaagcattgtcgagtagcttgctac

SEQ ID NO: 273842 - DNA, 25 bp, Probe sequence
aaaataatagagaccgtatcgatat

SEQ ID NO: 273843 - DNA, 25 bp, Probe sequence
aacagcaattattccaaacgattac

SEQ ID NO: 273844 - DNA, 25 bp, Probe sequence
caagaagaagacgctgaatttaata

SEQ ID NO: 273845 - DNA, 25 bp, Probe sequence
cagcgacatcccagataatctcata

SEQ ID NO: 273846 - DNA, 25 bp, Probe sequence
gcgacatcccagataatctcatatt

SEQ ID NO: 273847 - DNA, 25 bp, Probe sequence
gcaattattccaaacgattactgtc

SEQ ID NO: 273848 - DNA, 25 bp, Probe sequence
gaagacgctgaatttaataaagtat

SEQ ID NO: 273849 - DNA, 25 bp, Probe sequence
gaaagagactgatttacgagttata

SEQ ID NO: 273850 - DNA, 25 bp, Probe sequence
gacagcgacatcccagataatctca

SEQ ID NO: 273851 - DNA, 25 bp, Probe sequence
gacatcccagataatctcatatttt

SEQ ID NO: 273852 - DNA, 25 bp, Probe sequence
gaccgtatcgatattgacagcgaca

SEQ ID NO: 273853 - DNA, 25 bp, Probe sequence
gatattgacagcgacatcccagata

SEQ ID NO: 273854 - DNA, 25 bp, Probe sequence
gattactgtcaatcaaatttgcgac

SEQ ID NO: 273855 - DNA, 25 bp, Probe sequence
gttagaacagcaattattccaaacg

SEQ ID NO: 273856 - DNA, 25 bp, Probe sequence
gtatcgatattgacagcgacatccc

SEQ ID NO: 273857 - DNA, 25 bp, Probe sequence
tattgacagcgacatcccagataat

SEQ ID NO: 273858 - DNA, 25 bp, Probe sequence
ttatatttatgactcgttgattgaa

SEQ ID NO: 273859 - DNA, 25 bp, Probe sequence
ttactgtcaatcaaatttgcgacaa

SEQ ID NO: 273860 - DNA, 25 bp, Probe sequence
ttgacagcgacatcccagataatct

SEQ ID NO: 273861 - DNA, 25 bp, Probe sequence
ttgttcaatcaattgactaaagact

SEQ ID NO: 273862 - DNA, 25 bp, Probe sequence
attgcgttagactcttgctcttaga

SEQ ID NO: 273863 - DNA, 25 bp, Probe sequence
atatctttctcaaaaattcaatcta

SEQ ID NO: 273864 - DNA, 25 bp, Probe sequence
aggatgaaacttaatcacgattgcg

SEQ ID NO: 273865 - DNA, 25 bp, Probe sequence
accacttactcgacataatttcaac

SEQ ID NO: 273866 - DNA, 25 bp, Probe sequence
acgattgcgttagactcttgctctt

SEQ ID NO: 273867 - DNA, 25 bp, Probe sequence
aaattagcttttcaatatctttctc

SEQ ID NO: 273868 - DNA, 25 bp, Probe sequence
cagtaatgtactcacttttaaaatt

SEQ ID NO: 273869 - DNA, 25 bp, Probe sequence
catccagtatgtctcttaatcttat

SEQ ID NO: 273870 - DNA, 25 bp, Probe sequence
ctcgacataatttcaacgataatat

SEQ ID NO: 273871 - DNA, 25 bp, Probe sequence
ctgctatactcctgttatggaggtg

SEQ ID NO: 273872 - DNA, 25 bp, Probe sequence
gccatgaatttctcgataatattag

SEQ ID NO: 273873 - DNA, 25 bp, Probe sequence
gcgttagactcttgctcttagaaat

SEQ ID NO: 273874 - DNA, 25 bp, Probe sequence
gctaaatttatttgttgcgatctga

SEQ ID NO: 273875 - DNA, 25 bp, Probe sequence
gaaggcagggtcgtttcttggatta

SEQ ID NO: 273876 - DNA, 25 bp, Probe sequence
gaaaataggtgaaccacttactcga

SEQ ID NO: 273877 - DNA, 25 bp, Probe sequence
gaaacagtaatgtactcacttttaa

SEQ ID NO: 273878 - DNA, 25 bp, Probe sequence
gacatcacttggtctggccatgaat

SEQ ID NO: 273879 - DNA, 25 bp, Probe sequence
gactcttgctcttagaaatagaatc

SEQ ID NO: 273880 - DNA, 25 bp, Probe sequence
gttgcgatctgaaattcatcgaagg

SEQ ID NO: 273881 - DNA, 25 bp, Probe sequence
gtatgtctcttaatcttatggggaa

SEQ ID NO: 273882 - DNA, 25 bp, Probe sequence
gtctggccatgaatttctcgataat

SEQ ID NO: 273883 - DNA, 25 bp, Probe sequence
gtcgttaacaaaacatccagtatgt

SEQ ID NO: 273884 - DNA, 25 bp, Probe sequence
gtgaaccacttactcgacataattt

SEQ ID NO: 273885 - DNA, 25 bp, Probe sequence
gggtcgtttcttggattattgatga

SEQ ID NO: 273886 - DNA, 25 bp, Probe sequence
ggcagggtcgtttcttggattattg

SEQ ID NO: 273887 - DNA, 25 bp, Probe sequence
tgtctcttaatcttatggggaaatt

SEQ ID NO: 273888 - DNA, 25 bp, Probe sequence
tgatgacatcacttggtctggccat

SEQ ID NO: 273889 - DNA, 25 bp, Probe sequence
tcatcgaaggcagggtcgtttcttg

SEQ ID NO: 273890 - DNA, 25 bp, Probe sequence
tcgtttcttggattattgatgacat

SEQ ID NO: 273891 - DNA, 25 bp, Probe sequence
tcacgattgcgttagactcttgctc

SEQ ID NO: 273892 - DNA, 25 bp, Probe sequence
tactcctgttatggaggtgatagga

SEQ ID NO: 273893 - DNA, 25 bp, Probe sequence
taggtgaaccacttactcgacataa

SEQ ID NO: 273894 - DNA, 25 bp, Probe sequence
ttagcttttcaatatctttctcaaa

SEQ ID NO: 273895 - DNA, 25 bp, Probe sequence
ttggtctggccatgaatttctcgat

SEQ ID NO: 273896 - DNA, 25 bp, Probe sequence
atacaccttaatgactatgcatggt

SEQ ID NO: 273897 - DNA, 25 bp, Probe sequence
atgcatggtctttttaatcaactta

SEQ ID NO: 273898 - DNA, 25 bp, Probe sequence
atgacaaaatattaatcaattggcg

SEQ ID NO: 273899 - DNA, 25 bp, Probe sequence
atgactatgcatggtctttttaatc

SEQ ID NO: 273900 - DNA, 25 bp, Probe sequence
agtctgtttacaaagaactgaagaa

SEQ ID NO: 273901 - DNA, 25 bp, Probe sequence
agttacagtctgtttacaaagaact

SEQ ID NO: 273902 - DNA, 25 bp, Probe sequence
accttaatgactatgcatggtcttt

SEQ ID NO: 273903 - DNA, 25 bp, Probe sequence
actatgcatggtctttttaatcaac

SEQ ID NO: 273904 - DNA, 25 bp, Probe sequence
acagtctgtttacaaagaactgaag

SEQ ID NO: 273905 - DNA, 25 bp, Probe sequence
acagttacagtctgtttacaaagaa

SEQ ID NO: 273906 - DNA, 25 bp, Probe sequence
acaccttaatgactatgcatggtct

SEQ ID NO: 273907 - DNA, 25 bp, Probe sequence
aaatacaccttaatgactatgcatg

SEQ ID NO: 273908 - DNA, 25 bp, Probe sequence
aatgactatgcatggtctttttaat

SEQ ID NO: 273909 - DNA, 25 bp, Probe sequence
aatacaccttaatgactatgcatgg

SEQ ID NO: 273910 - DNA, 25 bp, Probe sequence
cagttacagtctgtttacaaagaac

SEQ ID NO: 273911 - DNA, 25 bp, Probe sequence
caccttaatgactatgcatggtctt

SEQ ID NO: 273912 - DNA, 25 bp, Probe sequence
cttaatgactatgcatggtcttttt

SEQ ID NO: 273913 - DNA, 25 bp, Probe sequence
ctatgcatggtctttttaatcaact

SEQ ID NO: 273914 - DNA, 25 bp, Probe sequence
ccttaatgactatgcatggtctttt

SEQ ID NO: 273915 - DNA, 25 bp, Probe sequence
gcatggtctttttaatcaacttaaa

SEQ ID NO: 273916 - DNA, 25 bp, Probe sequence
gactatgcatggtctttttaatcaa

SEQ ID NO: 273917 - DNA, 25 bp, Probe sequence
gttacagtctgtttacaaagaactg

SEQ ID NO: 273918 - DNA, 25 bp, Probe sequence
gtctgtttacaaagaactgaagaac

SEQ ID NO: 273919 - DNA, 25 bp, Probe sequence
tgactatgcatggtctttttaatca

SEQ ID NO: 273920 - DNA, 25 bp, Probe sequence
tgcatggtctttttaatcaacttaa

SEQ ID NO: 273921 - DNA, 25 bp, Probe sequence
tctgtttacaaagaactgaagaact

SEQ ID NO: 273922 - DNA, 25 bp, Probe sequence
taatgactatgcatggtctttttaa

SEQ ID NO: 273923 - DNA, 25 bp, Probe sequence
tacaaagaactgaagaactattaaa

SEQ ID NO: 273924 - DNA, 25 bp, Probe sequence
tacaccttaatgactatgcatggtc

SEQ ID NO: 273925 - DNA, 25 bp, Probe sequence
tacagtctgtttacaaagaactgaa

SEQ ID NO: 273926 - DNA, 25 bp, Probe sequence
tatgcatggtctttttaatcaactt

SEQ ID NO: 273927 - DNA, 25 bp, Probe sequence
tttacaaagaactgaagaactatta

SEQ ID NO: 273928 - DNA, 25 bp, Probe sequence
ttacagtctgtttacaaagaactga

SEQ ID NO: 273929 - DNA, 25 bp, Probe sequence
ttaatgactatgcatggtcttttta

SEQ ID NO: 273930 - DNA, 25 bp, Probe sequence
atataagtactacagtagaaacact

SEQ ID NO: 273931 - DNA, 25 bp, Probe sequence
ataagtactacagtagaaacactta

SEQ ID NO: 273932 - DNA, 25 bp, Probe sequence
atgccagatataagtactacagtag

SEQ ID NO: 273933 - DNA, 25 bp, Probe sequence
atgactctaatagaaccagatatga

SEQ ID NO: 273934 - DNA, 25 bp, Probe sequence
agtactacagtagaaacacttaatc

SEQ ID NO: 273935 - DNA, 25 bp, Probe sequence
agtagaaacacttaatctcatatct

SEQ ID NO: 273936 - DNA, 25 bp, Probe sequence
agatataagtactacagtagaaaca

SEQ ID NO: 273937 - DNA, 25 bp, Probe sequence
agaaacacttaatctcatatctaaa

SEQ ID NO: 273938 - DNA, 25 bp, Probe sequence
agaatgccagatataagtactacag

SEQ ID NO: 273939 - DNA, 25 bp, Probe sequence
actacagtagaaacacttaatctca

SEQ ID NO: 273940 - DNA, 25 bp, Probe sequence
acagtagaaacacttaatctcatat

SEQ ID NO: 273941 - DNA, 25 bp, Probe sequence
aaacacttaatctcatatctaaaat

SEQ ID NO: 273942 - DNA, 25 bp, Probe sequence
aacacttaatctcatatctaaaatg

SEQ ID NO: 273943 - DNA, 25 bp, Probe sequence
aagaatgccagatataagtactaca

SEQ ID NO: 273944 - DNA, 25 bp, Probe sequence
aagtactacagtagaaacacttaat

SEQ ID NO: 273945 - DNA, 25 bp, Probe sequence
aatgccagatataagtactacagta

SEQ ID NO: 273946 - DNA, 25 bp, Probe sequence
cagatataagtactacagtagaaac

SEQ ID NO: 273947 - DNA, 25 bp, Probe sequence
cagtagaaacacttaatctcatatc

SEQ ID NO: 273948 - DNA, 25 bp, Probe sequence
ctacagtagaaacacttaatctcat

SEQ ID NO: 273949 - DNA, 25 bp, Probe sequence
ccagatataagtactacagtagaaa

SEQ ID NO: 273950 - DNA, 25 bp, Probe sequence
gccagatataagtactacagtagaa

SEQ ID NO: 273951 - DNA, 25 bp, Probe sequence
gaatgccagatataagtactacagt

SEQ ID NO: 273952 - DNA, 25 bp, Probe sequence
gaaacacttaatctcatatctaaaa

SEQ ID NO: 273953 - DNA, 25 bp, Probe sequence
gatataagtactacagtagaaacac

SEQ ID NO: 273954 - DNA, 25 bp, Probe sequence
gtagaaacacttaatctcatatcta

SEQ ID NO: 273955 - DNA, 25 bp, Probe sequence
gtactacagtagaaacacttaatct

SEQ ID NO: 273956 - DNA, 25 bp, Probe sequence
tgccagatataagtactacagtaga

SEQ ID NO: 273957 - DNA, 25 bp, Probe sequence
taagtactacagtagaaacacttaa

SEQ ID NO: 273958 - DNA, 25 bp, Probe sequence
taagaatgccagatataagtactac

SEQ ID NO: 273959 - DNA, 25 bp, Probe sequence
tactacagtagaaacacttaatctc

SEQ ID NO: 273960 - DNA, 25 bp, Probe sequence
tacagtagaaacacttaatctcata

SEQ ID NO: 273961 - DNA, 25 bp, Probe sequence
tataagtactacagtagaaacactt

SEQ ID NO: 273962 - DNA, 25 bp, Probe sequence
ttgcacctgaacataagcataaata

SEQ ID NO: 273963 - DNA, 25 bp, Probe sequence
attttgtacaggtatctgtgactgt

SEQ ID NO: 273964 - DNA, 25 bp, Probe sequence
atattacagaattagaagagcgtat

SEQ ID NO: 273965 - DNA, 25 bp, Probe sequence
atctgtgactgtgaaagatagtaca

SEQ ID NO: 273966 - DNA, 25 bp, Probe sequence
aggctattttgtacaggtatctgtg

SEQ ID NO: 273967 - DNA, 25 bp, Probe sequence
acaggtatctgtgactgtgaaagat

SEQ ID NO: 273968 - DNA, 25 bp, Probe sequence
acaccagaaggctattttgtacagg

SEQ ID NO: 273969 - DNA, 25 bp, Probe sequence
aaaacaattggatagtgaggagaaa

SEQ ID NO: 273970 - DNA, 25 bp, Probe sequence
aaggctattttgtacaggtatctgt

SEQ ID NO: 273971 - DNA, 25 bp, Probe sequence
caccagaaggctattttgtacaggt

SEQ ID NO: 273972 - DNA, 25 bp, Probe sequence
cacagaaaattattttgtaccttat

SEQ ID NO: 273973 - DNA, 25 bp, Probe sequence
cagaaggctattttgtacaggtatc

SEQ ID NO: 273974 - DNA, 25 bp, Probe sequence
catccagatattaacacagaaaatt

SEQ ID NO: 273975 - DNA, 25 bp, Probe sequence
cgagatgcaactatcgataaaacga

SEQ ID NO: 273976 - DNA, 25 bp, Probe sequence
ccagaaggctattttgtacaggtat

SEQ ID NO: 273977 - DNA, 25 bp, Probe sequence
gcgggattaaaacaattggatagtg

SEQ ID NO: 273978 - DNA, 25 bp, Probe sequence
gctattttgtacaggtatctgtgac

SEQ ID NO: 273979 - DNA, 25 bp, Probe sequence
gaaggctattttgtacaggtatctg

SEQ ID NO: 273980 - DNA, 25 bp, Probe sequence
gactgtgaaagatagtacagagact

SEQ ID NO: 273981 - DNA, 25 bp, Probe sequence
gatgcgggattaaaacaattggata

SEQ ID NO: 273982 - DNA, 25 bp, Probe sequence
gatgcaactatcgataaaacgatga

SEQ ID NO: 273983 - DNA, 25 bp, Probe sequence
gataaaacgatgagatggctaaaaa

SEQ ID NO: 273984 - DNA, 25 bp, Probe sequence
gtacaggtatctgtgactgtgaaag

SEQ ID NO: 273985 - DNA, 25 bp, Probe sequence
ggtatctgtgactgtgaaagatagt

SEQ ID NO: 273986 - DNA, 25 bp, Probe sequence
tggcttccagtattggactttagaa

SEQ ID NO: 273987 - DNA, 25 bp, Probe sequence
ggcttccagtattggactttagaaa

SEQ ID NO: 273988 - DNA, 25 bp, Probe sequence
tgtacaggtatctgtgactgtgaaa

SEQ ID NO: 273989 - DNA, 25 bp, Probe sequence
tcgataaaacgatgagatggctaaa

SEQ ID NO: 273990 - DNA, 25 bp, Probe sequence
tcgttaaagcttcggctttacacgg

SEQ ID NO: 273991 - DNA, 25 bp, Probe sequence
taaattgagtcaaaaacaaatcgca

SEQ ID NO: 273992 - DNA, 25 bp, Probe sequence
tagatgcgggattaaaacaattgga

SEQ ID NO: 273993 - DNA, 25 bp, Probe sequence
tttgtacaggtatctgtgactgtga

SEQ ID NO: 273994 - DNA, 25 bp, Probe sequence
ttcgttaaagcttcggctttacacg

SEQ ID NO: 273995 - DNA, 25 bp, Probe sequence
ttgctaaaggtagtgcaacaacttt

SEQ ID NO: 273996 - DNA, 25 bp, Probe sequence
ttgtacaggtatctgtgactgtgaa

SEQ ID NO: 273997 - DNA, 25 bp, Probe sequence
atttcaatgaccggttactctatta

SEQ ID NO: 273998 - DNA, 25 bp, Probe sequence
atcctgaatctacaaattccgcttc

SEQ ID NO: 273999 - DNA, 25 bp, Probe sequence
agagtccacagataccaaaaagaac

SEQ ID NO: 274000 - DNA, 25 bp, Probe sequence
agcacgctatgaaagtatcaacgga

SEQ ID NO: 274001 - DNA, 25 bp, Probe sequence
aaattgaggaacacatggctggacg

SEQ ID NO: 274002 - DNA, 25 bp, Probe sequence
aaaagcattctaattctgacaataa

SEQ ID NO: 274003 - DNA, 25 bp, Probe sequence
aacaaaagttgatgaccaacatgct

SEQ ID NO: 274004 - DNA, 25 bp, Probe sequence
aacaactggcaagaataccaactta

SEQ ID NO: 274005 - DNA, 25 bp, Probe sequence
aactaattcttctcatatgactcgt

SEQ ID NO: 274006 - DNA, 25 bp, Probe sequence
aattcttctcatatgactcgtacct

SEQ ID NO: 274007 - DNA, 25 bp, Probe sequence
caatgaccggttactctattacaaa

SEQ ID NO: 274008 - DNA, 25 bp, Probe sequence
catgataacttctgggtgacagccg

SEQ ID NO: 274009 - DNA, 25 bp, Probe sequence
caaaaagaacatcggttatcatttt

SEQ ID NO: 274010 - DNA, 25 bp, Probe sequence
caaacaaccaattctgataatcagg

SEQ ID NO: 274011 - DNA, 25 bp, Probe sequence
cactatcatgataacttctgggtga

SEQ ID NO: 274012 - DNA, 25 bp, Probe sequence
caggaaaacaattcagtctttttag

SEQ ID NO: 274013 - DNA, 25 bp, Probe sequence
gtggtcaggagcggaaacccttgaa

SEQ ID NO: 274014 - DNA, 25 bp, Probe sequence
gaagtctttaatgacagataacagt

SEQ ID NO: 274015 - DNA, 25 bp, Probe sequence
gacgtcgaaaaacgtagcacgctat

SEQ ID NO: 274016 - DNA, 25 bp, Probe sequence
gaggcgacgaatttactcaaggaaa

SEQ ID NO: 274017 - DNA, 25 bp, Probe sequence
gatgctacagagaaagaggcgacga

SEQ ID NO: 274018 - DNA, 25 bp, Probe sequence
gataacagtatttctaaaaacggat

SEQ ID NO: 274019 - DNA, 25 bp, Probe sequence
gattgtcaaatcttcagtagagtca

SEQ ID NO: 274020 - DNA, 25 bp, Probe sequence
gtagagtcagattcaagttataaac

SEQ ID NO: 274021 - DNA, 25 bp, Probe sequence
gtagacatttctaaggtgaaacttt

SEQ ID NO: 274022 - DNA, 25 bp, Probe sequence
gtaactgtcgttaagcaagaagatg

SEQ ID NO: 274023 - DNA, 25 bp, Probe sequence
gtgacagccgatatgaaacgtttat

SEQ ID NO: 274024 - DNA, 25 bp, Probe sequence
ggaaatacttgtggtcaggagcgga

SEQ ID NO: 274025 - DNA, 25 bp, Probe sequence
ggcggaaatctagtagacatttcta

SEQ ID NO: 274026 - DNA, 25 bp, Probe sequence
tcgtgtcacctatcataacaaagac

SEQ ID NO: 274027 - DNA, 25 bp, Probe sequence
tcaggagcggaaacccttgaaacta

SEQ ID NO: 274028 - DNA, 25 bp, Probe sequence
tctttttagagtccacagataccaa

SEQ ID NO: 274029 - DNA, 25 bp, Probe sequence
taagcaagaagatgacttccacgtt

SEQ ID NO: 274030 - DNA, 25 bp, Probe sequence
ttaaattcatattcggacatagata

SEQ ID NO: 274031 - DNA, 25 bp, Probe sequence
attgacgacggatttttaccactca

SEQ ID NO: 274032 - DNA, 25 bp, Probe sequence
atcacgtggtagagccattagccgt

SEQ ID NO: 274033 - DNA, 25 bp, Probe sequence
atctgattcaagttacggccaaaat

SEQ ID NO: 274034 - DNA, 25 bp, Probe sequence
atggttagatgttaactacggttat

SEQ ID NO: 274035 - DNA, 25 bp, Probe sequence
aggacttacttgtgggatagtgcaa

SEQ ID NO: 274036 - DNA, 25 bp, Probe sequence
agtggaaggacttacttgtgggata

SEQ ID NO: 274037 - DNA, 25 bp, Probe sequence
accgcttccgataatcagggaacca

SEQ ID NO: 274038 - DNA, 25 bp, Probe sequence
acaaacaaaaatacatcaacttcta

SEQ ID NO: 274039 - DNA, 25 bp, Probe sequence
aaatacatcaacttctaatgaatcc

SEQ ID NO: 274040 - DNA, 25 bp, Probe sequence
aaagttgaggaacacatggttagat

SEQ ID NO: 274041 - DNA, 25 bp, Probe sequence
aaagatggttcatatatcgaccata

SEQ ID NO: 274042 - DNA, 25 bp, Probe sequence
aaaagtgatgaaatattatcttctg

SEQ ID NO: 274043 - DNA, 25 bp, Probe sequence
aaaatgatacattaagctcttattc

SEQ ID NO: 274044 - DNA, 25 bp, Probe sequence
aacaaccgcttccgataatcaggga

SEQ ID NO: 274045 - DNA, 25 bp, Probe sequence
aataatacaaccttaaaatcatgga

SEQ ID NO: 274046 - DNA, 25 bp, Probe sequence
aattgtcaaaacttcagttaaatct

SEQ ID NO: 274047 - DNA, 25 bp, Probe sequence
caagttacggccaaaatgatacatt

SEQ ID NO: 274048 - DNA, 25 bp, Probe sequence
ctttcgccccaaaaagtgatgaaat

SEQ ID NO: 274049 - DNA, 25 bp, Probe sequence
ccataaagatgtcccatacactggt

SEQ ID NO: 274050 - DNA, 25 bp, Probe sequence
gaatgacgcaatgaagaagaagttt

SEQ ID NO: 274051 - DNA, 25 bp, Probe sequence
gaaattactcagtagcatgaaaact

SEQ ID NO: 274052 - DNA, 25 bp, Probe sequence
gagccattagccgtgaaaatgaaac

SEQ ID NO: 274053 - DNA, 25 bp, Probe sequence
gaggcagagaaattactcagtagca

SEQ ID NO: 274054 - DNA, 25 bp, Probe sequence
gatgctacggagaaagaggcagaga

SEQ ID NO: 274055 - DNA, 25 bp, Probe sequence
gataaacaaacaaccgcttccgata

SEQ ID NO: 274056 - DNA, 25 bp, Probe sequence
gatttatcacgtggtagagccatta

SEQ ID NO: 274057 - DNA, 25 bp, Probe sequence
gttaaatctgattcaagttacggcc

SEQ ID NO: 274058 - DNA, 25 bp, Probe sequence
gtatgatgagaagaatgacgcaatg

SEQ ID NO: 274059 - DNA, 25 bp, Probe sequence
gtaactgtcgttaaacaagatgatg

SEQ ID NO: 274060 - DNA, 25 bp, Probe sequence
gtggtagagccattagccgtgaaaa

SEQ ID NO: 274061 - DNA, 25 bp, Probe sequence
tgtgggatagtgcaaaagatttaga

SEQ ID NO: 274062 - DNA, 25 bp, Probe sequence
taatcagggaaccaattccgtcttt

SEQ ID NO: 274063 - DNA, 25 bp, Probe sequence
taaacaagatgatgacttccacgtt

SEQ ID NO: 274064 - DNA, 25 bp, Probe sequence
tatcgaccataaagatgtcccatac

SEQ ID NO: 274065 - DNA, 25 bp, Probe sequence
ataaaaaagttgctgatttgacctc

SEQ ID NO: 274066 - DNA, 25 bp, Probe sequence
agtttgaggctacggagaatgaggc

SEQ ID NO: 274067 - DNA, 25 bp, Probe sequence
agttgctgatttgacctcaaacttt

SEQ ID NO: 274068 - DNA, 25 bp, Probe sequence
agataaaaaagttgctgatttgacc

SEQ ID NO: 274069 - DNA, 25 bp, Probe sequence
agaagtttgaggctacggagaatga

SEQ ID NO: 274070 - DNA, 25 bp, Probe sequence
aaagttgctgatttgacctcaaact

SEQ ID NO: 274071 - DNA, 25 bp, Probe sequence
aaaaaagttgctgatttgacctcaa

SEQ ID NO: 274072 - DNA, 25 bp, Probe sequence
aaaaagttgctgatttgacctcaaa

SEQ ID NO: 274073 - DNA, 25 bp, Probe sequence
aaaagttgctgatttgacctcaaac

SEQ ID NO: 274074 - DNA, 25 bp, Probe sequence
aagaagtttgaggctacggagaatg

SEQ ID NO: 274075 - DNA, 25 bp, Probe sequence
aagttgctgatttgacctcaaactt

SEQ ID NO: 274076 - DNA, 25 bp, Probe sequence
aagtttgaggctacggagaatgagg

SEQ ID NO: 274077 - DNA, 25 bp, Probe sequence
cagataaaaaagttgctgatttgac

SEQ ID NO: 274078 - DNA, 25 bp, Probe sequence
gctgatttgacctcaaactttaaaa

SEQ ID NO: 274079 - DNA, 25 bp, Probe sequence
gaagtttgaggctacggagaatgag

SEQ ID NO: 274080 - DNA, 25 bp, Probe sequence
gataaaaaagttgctgatttgacct

SEQ ID NO: 274081 - DNA, 25 bp, Probe sequence
gttgctgatttgacctcaaacttta

SEQ ID NO: 274082 - DNA, 25 bp, Probe sequence
gtttgaggctacggagaatgaggca

SEQ ID NO: 274083 - DNA, 25 bp, Probe sequence
tgatttgacctcaaactttaaaaat

SEQ ID NO: 274084 - DNA, 25 bp, Probe sequence
tgctgatttgacctcaaactttaaa

SEQ ID NO: 274085 - DNA, 25 bp, Probe sequence
tcaaaagatttagatacgaagtctg

SEQ ID NO: 274086 - DNA, 25 bp, Probe sequence
taaaaaagttgctgatttgacctca

SEQ ID NO: 274087 - DNA, 25 bp, Probe sequence
ttgctgatttgacctcaaactttaa

SEQ ID NO: 274088 - DNA, 25 bp, Probe sequence
atttgattttgaagctgttgataag

SEQ ID NO: 274089 - DNA, 25 bp, Probe sequence
atattactgctagttttgaaaatgg

SEQ ID NO: 274090 - DNA, 25 bp, Probe sequence
agacgaattatattacttagaagct

SEQ ID NO: 274091 - DNA, 25 bp, Probe sequence
accttcatttgtaacgaatatatat

SEQ ID NO: 274092 - DNA, 25 bp, Probe sequence
acgaattatattacttagaagctga

SEQ ID NO: 274093 - DNA, 25 bp, Probe sequence
actacttcatcaacatctattccaa

SEQ ID NO: 274094 - DNA, 25 bp, Probe sequence
acttcatcaacatctattccaattt

SEQ ID NO: 274095 - DNA, 25 bp, Probe sequence
acaccttcatttgtaacgaatatat

SEQ ID NO: 274096 - DNA, 25 bp, Probe sequence
aacagacgaattatattacttagaa

SEQ ID NO: 274097 - DNA, 25 bp, Probe sequence
aacaccttcatttgtaacgaatata

SEQ ID NO: 274098 - DNA, 25 bp, Probe sequence
aacttcaatcaattcgagaatcaaa

SEQ ID NO: 274099 - DNA, 25 bp, Probe sequence
aacggtaatccaagtgatacattta

SEQ ID NO: 274100 - DNA, 25 bp, Probe sequence
aatttgattttgaagctgttgataa

SEQ ID NO: 274101 - DNA, 25 bp, Probe sequence
caacaccttcatttgtaacgaatat

SEQ ID NO: 274102 - DNA, 25 bp, Probe sequence
caccttcatttgtaacgaatatata

SEQ ID NO: 274103 - DNA, 25 bp, Probe sequence
cttcatcaacatctattccaatttc

SEQ ID NO: 274104 - DNA, 25 bp, Probe sequence
ctacttcatcaacatctattccaat

SEQ ID NO: 274105 - DNA, 25 bp, Probe sequence
ccttcatttgtaacgaatatatatg

SEQ ID NO: 274106 - DNA, 25 bp, Probe sequence
gaacttcaatcaattcgagaatcaa

SEQ ID NO: 274107 - DNA, 25 bp, Probe sequence
gaaacagacgaattatattacttag

SEQ ID NO: 274108 - DNA, 25 bp, Probe sequence
gacgaattatattacttagaagctg

SEQ ID NO: 274109 - DNA, 25 bp, Probe sequence
gtaacgaatatatatgaaacagacg

SEQ ID NO: 274110 - DNA, 25 bp, Probe sequence
gtgatgatattgaacttcaatcaat

SEQ ID NO: 274111 - DNA, 25 bp, Probe sequence
ttttaacggtaatccaagtgataca

SEQ ID NO: 274112 - DNA, 25 bp, Probe sequence
tgattttgaagctgttgataagcaa

SEQ ID NO: 274113 - DNA, 25 bp, Probe sequence
tgaacttcaatcaattcgagaatca

SEQ ID NO: 274114 - DNA, 25 bp, Probe sequence
tgcctaaaatcaaaccaagcaatga

SEQ ID NO: 274115 - DNA, 25 bp, Probe sequence
tcaattcgagaatcaaaactttttt

SEQ ID NO: 274116 - DNA, 25 bp, Probe sequence
taacggtaatccaagtgatacattt

SEQ ID NO: 274117 - DNA, 25 bp, Probe sequence
tacttcatcaacatctattccaatt

SEQ ID NO: 274118 - DNA, 25 bp, Probe sequence
tttaacggtaatccaagtgatacat

SEQ ID NO: 274119 - DNA, 25 bp, Probe sequence
tattactgctagttttgaaaatggg

SEQ ID NO: 274120 - DNA, 25 bp, Probe sequence
ttaacggtaatccaagtgatacatt

SEQ ID NO: 274121 - DNA, 25 bp, Probe sequence
ttgattttgaagctgttgataagca

SEQ ID NO: 274122 - DNA, 25 bp, Probe sequence
atattattgaaattacaggtgtaac

SEQ ID NO: 274123 - DNA, 25 bp, Probe sequence
atgctgtattgctaaaacatatgaa

SEQ ID NO: 274124 - DNA, 25 bp, Probe sequence
atggtcatacgaaagcatatcaatc

SEQ ID NO: 274125 - DNA, 25 bp, Probe sequence
aaattatcgcgtttataaacagcaa

SEQ ID NO: 274126 - DNA, 25 bp, Probe sequence
aagacagcttacaatcgcaggatat

SEQ ID NO: 274127 - DNA, 25 bp, Probe sequence
aagacactacagtcacaatatgata

SEQ ID NO: 274128 - DNA, 25 bp, Probe sequence
aagtcttttgattttgatatcgcta

SEQ ID NO: 274129 - DNA, 25 bp, Probe sequence
aattaattagacgctctgtatgtga

SEQ ID NO: 274130 - DNA, 25 bp, Probe sequence
caattgcgaaagttattatcagagc

SEQ ID NO: 274131 - DNA, 25 bp, Probe sequence
caatcgcaggatatcagacataaat

SEQ ID NO: 274132 - DNA, 25 bp, Probe sequence
caaagattactttaattcatatgat

SEQ ID NO: 274133 - DNA, 25 bp, Probe sequence
cagaagctgttaattattttttgag

SEQ ID NO: 274134 - DNA, 25 bp, Probe sequence
ctctctaatagataccagcatttta

SEQ ID NO: 274135 - DNA, 25 bp, Probe sequence
cgatgaaataggattattagttcca

SEQ ID NO: 274136 - DNA, 25 bp, Probe sequence
gcgtttataaacagcaagacttaga

SEQ ID NO: 274137 - DNA, 25 bp, Probe sequence
gcttacaatcgcaggatatcagaca

SEQ ID NO: 274138 - DNA, 25 bp, Probe sequence
gcatatcaatcatttattagacgta

SEQ ID NO: 274139 - DNA, 25 bp, Probe sequence
gcatctataaaatatggtcatacga

SEQ ID NO: 274140 - DNA, 25 bp, Probe sequence
gcaggatatcagacataaattgaca

SEQ ID NO: 274141 - DNA, 25 bp, Probe sequence
gaactttacattattacgatgaaat

SEQ ID NO: 274142 - DNA, 25 bp, Probe sequence
gaacaattgcgaaagttattatcag

SEQ ID NO: 274143 - DNA, 25 bp, Probe sequence
gaaacattatgctgtattgctaaaa

SEQ ID NO: 274144 - DNA, 25 bp, Probe sequence
gacactacagtcacaatatgataaa

SEQ ID NO: 274145 - DNA, 25 bp, Probe sequence
gacagcttacaatcgcaggatatca

SEQ ID NO: 274146 - DNA, 25 bp, Probe sequence
gacttacaattaattagacgctctg

SEQ ID NO: 274147 - DNA, 25 bp, Probe sequence
gacgtaaagacagcttacaatcgca

SEQ ID NO: 274148 - DNA, 25 bp, Probe sequence
gacgctctgtatgtgaatttattaa

SEQ ID NO: 274149 - DNA, 25 bp, Probe sequence
gatgaaacattatgctgtattgcta

SEQ ID NO: 274150 - DNA, 25 bp, Probe sequence
gatacgcgtttcaaagattacttta

SEQ ID NO: 274151 - DNA, 25 bp, Probe sequence
gtcttttgattttgatatcgctaaa

SEQ ID NO: 274152 - DNA, 25 bp, Probe sequence
taatactcaagtcttttgattttga

SEQ ID NO: 274153 - DNA, 25 bp, Probe sequence
tacgaaagcatatcaatcatttatt

SEQ ID NO: 274154 - DNA, 25 bp, Probe sequence
tttcagaagctgttaattatttttt

SEQ ID NO: 274155 - DNA, 25 bp, Probe sequence
ttagacgctctgtatgtgaatttat

SEQ ID NO: 274156 - DNA, 25 bp, Probe sequence
tagccgggtacacggtctttgcagt

SEQ ID NO: 274157 - DNA, 25 bp, Probe sequence
atagccgggtacacggtctttgcag

SEQ ID NO: 274158 - DNA, 25 bp, Probe sequence
atacaaaccatagccgggtacacgg

SEQ ID NO: 274159 - DNA, 25 bp, Probe sequence
attgatacaaaccatagccgggtac

SEQ ID NO: 274160 - DNA, 25 bp, Probe sequence
attgttactgcaaatattattgtta

SEQ ID NO: 274161 - DNA, 25 bp, Probe sequence
atttcgtaagtattgttactgcaaa

SEQ ID NO: 274162 - DNA, 25 bp, Probe sequence
atatttcgtaagtattgttactgca

SEQ ID NO: 274163 - DNA, 25 bp, Probe sequence
accatagccgggtacacggtctttg

SEQ ID NO: 274164 - DNA, 25 bp, Probe sequence
agtattgttactgcaaatattattg

SEQ ID NO: 274165 - DNA, 25 bp, Probe sequence
acattgatacaaaccatagccgggt

SEQ ID NO: 274166 - DNA, 25 bp, Probe sequence
aaacattgatacaaaccatagccgg

SEQ ID NO: 274167 - DNA, 25 bp, Probe sequence
aacattgatacaaaccatagccggg

SEQ ID NO: 274168 - DNA, 25 bp, Probe sequence
aagtattgttactgcaaatattatt

SEQ ID NO: 274169 - DNA, 25 bp, Probe sequence
caaaccatagccgggtacacggtct

SEQ ID NO: 274170 - DNA, 25 bp, Probe sequence
catagccgggtacacggtctttgca

SEQ ID NO: 274171 - DNA, 25 bp, Probe sequence
cattgatacaaaccatagccgggta

SEQ ID NO: 274172 - DNA, 25 bp, Probe sequence
cgtaagtattgttactgcaaatatt

SEQ ID NO: 274173 - DNA, 25 bp, Probe sequence
ccatagccgggtacacggtctttgc

SEQ ID NO: 274174 - DNA, 25 bp, Probe sequence
gatacaaaccatagccgggtacacg

SEQ ID NO: 274175 - DNA, 25 bp, Probe sequence
gttactgcaaatattattgttaaaa

SEQ ID NO: 274176 - DNA, 25 bp, Probe sequence
gtattgttactgcaaatattattgt

SEQ ID NO: 274177 - DNA, 25 bp, Probe sequence
gtaagtattgttactgcaaatatta

SEQ ID NO: 274178 - DNA, 25 bp, Probe sequence
tgatacaaaccatagccgggtacac

SEQ ID NO: 274179 - DNA, 25 bp, Probe sequence
tgttactgcaaatattattgttaaa

SEQ ID NO: 274180 - DNA, 25 bp, Probe sequence
tcgtaagtattgttactgcaaatat

SEQ ID NO: 274181 - DNA, 25 bp, Probe sequence
taagtattgttactgcaaatattat

SEQ ID NO: 274182 - DNA, 25 bp, Probe sequence
tacaaaccatagccgggtacacggt

SEQ ID NO: 274183 - DNA, 25 bp, Probe sequence
tatttcgtaagtattgttactgcaa

SEQ ID NO: 274184 - DNA, 25 bp, Probe sequence
tatatttcgtaagtattgttactgc

SEQ ID NO: 274185 - DNA, 25 bp, Probe sequence
tattgttactgcaaatattattgtt

SEQ ID NO: 274186 - DNA, 25 bp, Probe sequence
tttcgtaagtattgttactgcaaat

SEQ ID NO: 274187 - DNA, 25 bp, Probe sequence
ttgatacaaaccatagccgggtaca

SEQ ID NO: 274188 - DNA, 25 bp, Probe sequence
ttcgtaagtattgttactgcaaata

SEQ ID NO: 274189 - DNA, 25 bp, Probe sequence
ttgttactgcaaatattattgttaa

SEQ ID NO: 274190 - DNA, 25 bp, Probe sequence
attgattcaaacacttgccggttac

SEQ ID NO: 274191 - DNA, 25 bp, Probe sequence
attcaaacacttgccggttacaccg

SEQ ID NO: 274192 - DNA, 25 bp, Probe sequence
attgttaccgcaaatattgttgtca

SEQ ID NO: 274193 - DNA, 25 bp, Probe sequence
attatatttcgcgagtattgttacc

SEQ ID NO: 274194 - DNA, 25 bp, Probe sequence
atttcgcgagtattgttaccgcaaa

SEQ ID NO: 274195 - DNA, 25 bp, Probe sequence
atatttcgcgagtattgttaccgca

SEQ ID NO: 274196 - DNA, 25 bp, Probe sequence
aggttagtgctcatatgaaacttaa

SEQ ID NO: 274197 - DNA, 25 bp, Probe sequence
agaggttagtgctcatatgaaactt

SEQ ID NO: 274198 - DNA, 25 bp, Probe sequence
cattgattcaaacacttgccggtta

SEQ ID NO: 274199 - DNA, 25 bp, Probe sequence
acattgattcaaacacttgccggtt

SEQ ID NO: 274200 - DNA, 25 bp, Probe sequence
aaagaggttagtgctcatatgaaac

SEQ ID NO: 274201 - DNA, 25 bp, Probe sequence
aacattgattcaaacacttgccggt

SEQ ID NO: 274202 - DNA, 25 bp, Probe sequence
caaacacttgccggttacaccgtct

SEQ ID NO: 274203 - DNA, 25 bp, Probe sequence
cgcgagtattgttaccgcaaatatt

SEQ ID NO: 274204 - DNA, 25 bp, Probe sequence
gcgagtattgttaccgcaaatattg

SEQ ID NO: 274205 - DNA, 25 bp, Probe sequence
gagaaaagaggttagtgctcatatg

SEQ ID NO: 274206 - DNA, 25 bp, Probe sequence
gagtattgttaccgcaaatattgtt

SEQ ID NO: 274207 - DNA, 25 bp, Probe sequence
gaggttagtgctcatatgaaactta

SEQ ID NO: 274208 - DNA, 25 bp, Probe sequence
gattcaaacacttgccggttacacc

SEQ ID NO: 274209 - DNA, 25 bp, Probe sequence
gttaccgcaaatattgttgtcaaaa

SEQ ID NO: 274210 - DNA, 25 bp, Probe sequence
gttagtgctcatatgaaacttaatc

SEQ ID NO: 274211 - DNA, 25 bp, Probe sequence
gtattgttaccgcaaatattgttgt

SEQ ID NO: 274212 - DNA, 25 bp, Probe sequence
tgattcaaacacttgccggttacac

SEQ ID NO: 274213 - DNA, 25 bp, Probe sequence
tgttaccgcaaatattgttgtcaaa

SEQ ID NO: 274214 - DNA, 25 bp, Probe sequence
tcgcgagtattgttaccgcaaatat

SEQ ID NO: 274215 - DNA, 25 bp, Probe sequence
tcaaacacttgccggttacaccgtc

SEQ ID NO: 274216 - DNA, 25 bp, Probe sequence
taccgcaaatattgttgtcaaaaat

SEQ ID NO: 274217 - DNA, 25 bp, Probe sequence
tagtgctcatatgaaacttaatcaa

SEQ ID NO: 274218 - DNA, 25 bp, Probe sequence
tatttcgcgagtattgttaccgcaa

SEQ ID NO: 274219 - DNA, 25 bp, Probe sequence
tttcgcgagtattgttaccgcaaat

SEQ ID NO: 274220 - DNA, 25 bp, Probe sequence
ttatatttcgcgagtattgttaccg

SEQ ID NO: 274221 - DNA, 25 bp, Probe sequence
ttcgcgagtattgttaccgcaaata

SEQ ID NO: 274222 - DNA, 25 bp, Probe sequence
ttgttaccgcaaatattgttgtcaa

SEQ ID NO: 274223 - DNA, 25 bp, Probe sequence
ttgattcaaacacttgccggttaca

SEQ ID NO: 274224 - DNA, 25 bp, Probe sequence
attgagttaagtagcggttggaatt

SEQ ID NO: 274225 - DNA, 25 bp, Probe sequence
atttagatgctattgagttaagtag

SEQ ID NO: 274226 - DNA, 25 bp, Probe sequence
atgtctcaaaacgaaggtaaatctg

SEQ ID NO: 274227 - DNA, 25 bp, Probe sequence
aggtaaatctgttgatgcacttaaa

SEQ ID NO: 274228 - DNA, 25 bp, Probe sequence
agtagcggttggaattacaattcga

SEQ ID NO: 274229 - DNA, 25 bp, Probe sequence
agcggttggaattacaattcgaaat

SEQ ID NO: 274230 - DNA, 25 bp, Probe sequence
acgaaggtaaatctgttgatgcact

SEQ ID NO: 274231 - DNA, 25 bp, Probe sequence
acaatctaaccaaattaaaagagca

SEQ ID NO: 274232 - DNA, 25 bp, Probe sequence
aaatctgttgatgcacttaaaaata

SEQ ID NO: 274233 - DNA, 25 bp, Probe sequence
aacgaaggtaaatctgttgatgcac

SEQ ID NO: 274234 - DNA, 25 bp, Probe sequence
aagtagcggttggaattacaattcg

SEQ ID NO: 274235 - DNA, 25 bp, Probe sequence
aagtattaagttctaatgctaaagg

SEQ ID NO: 274236 - DNA, 25 bp, Probe sequence
aaggtaaatctgttgatgcacttaa

SEQ ID NO: 274237 - DNA, 25 bp, Probe sequence
aatctgttgatgcacttaaaaatag

SEQ ID NO: 274238 - DNA, 25 bp, Probe sequence
caatgtctcaaaacgaaggtaaatc

SEQ ID NO: 274239 - DNA, 25 bp, Probe sequence
ctggcaaaaatgcactactatcaga

SEQ ID NO: 274240 - DNA, 25 bp, Probe sequence
cgaaggtaaatctgttgatgcactt

SEQ ID NO: 274241 - DNA, 25 bp, Probe sequence
gcaaaaatgcactactatcagatag

SEQ ID NO: 274242 - DNA, 25 bp, Probe sequence
gagttaagtagcggttggaattaca

SEQ ID NO: 274243 - DNA, 25 bp, Probe sequence
gaaggtaaatctgttgatgcactta

SEQ ID NO: 274244 - DNA, 25 bp, Probe sequence
gatgctattgagttaagtagcggtt

SEQ ID NO: 274245 - DNA, 25 bp, Probe sequence
gttaagtagcggttggaattacaat

SEQ ID NO: 274246 - DNA, 25 bp, Probe sequence
gtagcggttggaattacaattcgaa

SEQ ID NO: 274247 - DNA, 25 bp, Probe sequence
gtaaatctgttgatgcacttaaaaa

SEQ ID NO: 274248 - DNA, 25 bp, Probe sequence
gtctcaaaacgaaggtaaatctgtt

SEQ ID NO: 274249 - DNA, 25 bp, Probe sequence
ggtaaatctgttgatgcacttaaaa

SEQ ID NO: 274250 - DNA, 25 bp, Probe sequence
ggttggaattacaattcgaaattgg

SEQ ID NO: 274251 - DNA, 25 bp, Probe sequence
ggcaaaaatgcactactatcagata

SEQ ID NO: 274252 - DNA, 25 bp, Probe sequence
tggcaaaaatgcactactatcagat

SEQ ID NO: 274253 - DNA, 25 bp, Probe sequence
tgttgatgcacttaaaaatagtacc

SEQ ID NO: 274254 - DNA, 25 bp, Probe sequence
taagtagcggttggaattacaattc

SEQ ID NO: 274255 - DNA, 25 bp, Probe sequence
taaagtattaagttctaatgctaaa

SEQ ID NO: 274256 - DNA, 25 bp, Probe sequence
tattgagttaagtagcggttggaat

SEQ ID NO: 274257 - DNA, 25 bp, Probe sequence
ttgagttaagtagcggttggaatta

SEQ ID NO: 274258 - DNA, 25 bp, Probe sequence
attttgctcatttttttgaatttga

SEQ ID NO: 274259 - DNA, 25 bp, Probe sequence
atttcagcaccaactacattttaaa

SEQ ID NO: 274260 - DNA, 25 bp, Probe sequence
atcagggtatattgccagaaagact

SEQ ID NO: 274261 - DNA, 25 bp, Probe sequence
atggagatgcatggcgttggtccta

SEQ ID NO: 274262 - DNA, 25 bp, Probe sequence
aggatgccaagttaagcaaagtgac

SEQ ID NO: 274263 - DNA, 25 bp, Probe sequence
agattcattttgctcatttttttga

SEQ ID NO: 274264 - DNA, 25 bp, Probe sequence
acgttcactggttacaacagaattt

SEQ ID NO: 274265 - DNA, 25 bp, Probe sequence
aaagtgacatcttacattgttgttg

SEQ ID NO: 274266 - DNA, 25 bp, Probe sequence
aactggtaaagagattcattttgct

SEQ ID NO: 274267 - DNA, 25 bp, Probe sequence
aagctatatcaatattggaacaagc

SEQ ID NO: 274268 - DNA, 25 bp, Probe sequence
aagcaaagtgacatcttacattgtt

SEQ ID NO: 274269 - DNA, 25 bp, Probe sequence
aagagattcattttgctcatttttt

SEQ ID NO: 274270 - DNA, 25 bp, Probe sequence
aattcacaaggtatatacacattag

SEQ ID NO: 274271 - DNA, 25 bp, Probe sequence
caagctttatttcagcaccaactac

SEQ ID NO: 274272 - DNA, 25 bp, Probe sequence
cagcaccaactacattttaaaacgg

SEQ ID NO: 274273 - DNA, 25 bp, Probe sequence
ctttatttcagcaccaactacattt

SEQ ID NO: 274274 - DNA, 25 bp, Probe sequence
ctaaaattggaaagcctgcaacacg

SEQ ID NO: 274275 - DNA, 25 bp, Probe sequence
gcgttggtcctaaagctatatcaat

SEQ ID NO: 274276 - DNA, 25 bp, Probe sequence
gcatggcgttggtcctaaagctata

SEQ ID NO: 274277 - DNA, 25 bp, Probe sequence
gaattattacgttcactggttacaa

SEQ ID NO: 274278 - DNA, 25 bp, Probe sequence
gagatgcatggcgttggtcctaaag

SEQ ID NO: 274279 - DNA, 25 bp, Probe sequence
gatgcatggcgttggtcctaaagct

SEQ ID NO: 274280 - DNA, 25 bp, Probe sequence
gatacaaatgactttacctaaaatt

SEQ ID NO: 274281 - DNA, 25 bp, Probe sequence
gatattgaattattacgttcactgg

SEQ ID NO: 274282 - DNA, 25 bp, Probe sequence
gtacaaatcagggtatattgccaga

SEQ ID NO: 274283 - DNA, 25 bp, Probe sequence
gggtatattgccagaaagactacca

SEQ ID NO: 274284 - DNA, 25 bp, Probe sequence
ggtcctaaagctatatcaatattgg

SEQ ID NO: 274285 - DNA, 25 bp, Probe sequence
ggttacaacagaatttatttggtct

SEQ ID NO: 274286 - DNA, 25 bp, Probe sequence
ggatggatacaaatgactttaccta

SEQ ID NO: 274287 - DNA, 25 bp, Probe sequence
ggaacaagctttatttcagcaccaa

SEQ ID NO: 274288 - DNA, 25 bp, Probe sequence
tggcgttggtcctaaagctatatca

SEQ ID NO: 274289 - DNA, 25 bp, Probe sequence
tctctaatggagatgcatggcgttg

SEQ ID NO: 274290 - DNA, 25 bp, Probe sequence
tattacgttcactggttacaacaga

SEQ ID NO: 274291 - DNA, 25 bp, Probe sequence
tttacctaaaattggaaagcctgca

SEQ ID NO: 274292 - DNA, 25 bp, Probe sequence
attcttattcaagacgatagtgcca

SEQ ID NO: 274293 - DNA, 25 bp, Probe sequence
attaagaatgcaacctgagttacag

SEQ ID NO: 274294 - DNA, 25 bp, Probe sequence
attagatttacagacatcaaagata

SEQ ID NO: 274295 - DNA, 25 bp, Probe sequence
attttaatttggctagtactggata

SEQ ID NO: 274296 - DNA, 25 bp, Probe sequence
atttggctagtactggatatatatc

SEQ ID NO: 274297 - DNA, 25 bp, Probe sequence
atattcttattcaagacgatagtgc

SEQ ID NO: 274298 - DNA, 25 bp, Probe sequence
ataagaggtatctactttttcatta

SEQ ID NO: 274299 - DNA, 25 bp, Probe sequence
atcattttaatttggctagtactgg

SEQ ID NO: 274300 - DNA, 25 bp, Probe sequence
atgcaacctgagttacaggcagatg

SEQ ID NO: 274301 - DNA, 25 bp, Probe sequence
aggcagatgctatatcgatgaatcc

SEQ ID NO: 274302 - DNA, 25 bp, Probe sequence
acaggcagatgctatatcgatgaat

SEQ ID NO: 274303 - DNA, 25 bp, Probe sequence
aaattaagaatgcaacctgagttac

SEQ ID NO: 274304 - DNA, 25 bp, Probe sequence
aacctgagttacaggcagatgctat

SEQ ID NO: 274305 - DNA, 25 bp, Probe sequence
aagaatgcaacctgagttacaggca

SEQ ID NO: 274306 - DNA, 25 bp, Probe sequence
aagaggtatctactttttcattatt

SEQ ID NO: 274307 - DNA, 25 bp, Probe sequence
cattttaatttggctagtactggat

SEQ ID NO: 274308 - DNA, 25 bp, Probe sequence
ctgagttacaggcagatgctatatc

SEQ ID NO: 274309 - DNA, 25 bp, Probe sequence
cctgagttacaggcagatgctatat

SEQ ID NO: 274310 - DNA, 25 bp, Probe sequence
gcaacctgagttacaggcagatgct

SEQ ID NO: 274311 - DNA, 25 bp, Probe sequence
gaatgcaacctgagttacaggcaga

SEQ ID NO: 274312 - DNA, 25 bp, Probe sequence
gagttacaggcagatgctatatcga

SEQ ID NO: 274313 - DNA, 25 bp, Probe sequence
gataagaggtatctactttttcatt

SEQ ID NO: 274314 - DNA, 25 bp, Probe sequence
gatttacagacatcaaagataagag

SEQ ID NO: 274315 - DNA, 25 bp, Probe sequence
gttgttacgacttggattattatag

SEQ ID NO: 274316 - DNA, 25 bp, Probe sequence
gttacaggcagatgctatatcgatg

SEQ ID NO: 274317 - DNA, 25 bp, Probe sequence
gttacgacttggattattatagcta

SEQ ID NO: 274318 - DNA, 25 bp, Probe sequence
tcattttaatttggctagtactgga

SEQ ID NO: 274319 - DNA, 25 bp, Probe sequence
taatttggctagtactggatatata

SEQ ID NO: 274320 - DNA, 25 bp, Probe sequence
taagaggtatctactttttcattat

SEQ ID NO: 274321 - DNA, 25 bp, Probe sequence
tagttgttacgacttggattattat

SEQ ID NO: 274322 - DNA, 25 bp, Probe sequence
tttggctagtactggatatatatcg

SEQ ID NO: 274323 - DNA, 25 bp, Probe sequence
tttaatttggctagtactggatata

SEQ ID NO: 274324 - DNA, 25 bp, Probe sequence
ttacgacttggattattatagctac

SEQ ID NO: 274325 - DNA, 25 bp, Probe sequence
ttacaggcagatgctatatcgatga

SEQ ID NO: 274326 - DNA, 25 bp, Probe sequence
atcaaaataggaggggcgtcatcat

SEQ ID NO: 274327 - DNA, 25 bp, Probe sequence
atgaaagcacatacgatgcaaacgt

SEQ ID NO: 274328 - DNA, 25 bp, Probe sequence
aggacttgtagcgacagcaggttct

SEQ ID NO: 274329 - DNA, 25 bp, Probe sequence
aggtaataggacttgtagcgacagc

SEQ ID NO: 274330 - DNA, 25 bp, Probe sequence
agcaggttctagtaaacattattta

SEQ ID NO: 274331 - DNA, 25 bp, Probe sequence
acgacgtcgttaatgcaggctgatg

SEQ ID NO: 274332 - DNA, 25 bp, Probe sequence
acattatttaattcctgaaatgcat

SEQ ID NO: 274333 - DNA, 25 bp, Probe sequence
aaaacgagaattgctatggatgatt

SEQ ID NO: 274334 - DNA, 25 bp, Probe sequence
aacgacgtcgttaatgcaggctgat

SEQ ID NO: 274335 - DNA, 25 bp, Probe sequence
aatgcaggctgatgtgatttttatt

SEQ ID NO: 274336 - DNA, 25 bp, Probe sequence
aataggaggggcgtcatcatgaata

SEQ ID NO: 274337 - DNA, 25 bp, Probe sequence
aattcctgaaatgcatttaaaacca

SEQ ID NO: 274338 - DNA, 25 bp, Probe sequence
cacaatgcgaactgccaaagtacaa

SEQ ID NO: 274339 - DNA, 25 bp, Probe sequence
caggctgatgtgatttttattggtt

SEQ ID NO: 274340 - DNA, 25 bp, Probe sequence
cttgtagcgacagcaggttctagta

SEQ ID NO: 274341 - DNA, 25 bp, Probe sequence
ccaatattgagttacatgaaagcac

SEQ ID NO: 274342 - DNA, 25 bp, Probe sequence
gcgacagcaggttctagtaaacatt

SEQ ID NO: 274343 - DNA, 25 bp, Probe sequence
gaattatctagatactacaggagat

SEQ ID NO: 274344 - DNA, 25 bp, Probe sequence
gaactagaagtcatcaatgagggac

SEQ ID NO: 274345 - DNA, 25 bp, Probe sequence
gaaatgcatttaaaaccaatattga

SEQ ID NO: 274346 - DNA, 25 bp, Probe sequence
gacttgtagcgacagcaggttctag

SEQ ID NO: 274347 - DNA, 25 bp, Probe sequence
gacgtcgttaatgcaggctgatgtg

SEQ ID NO: 274348 - DNA, 25 bp, Probe sequence
gagaattgctatggatgatttaaaa

SEQ ID NO: 274349 - DNA, 25 bp, Probe sequence
gagttacatgaaagcacatacgatg

SEQ ID NO: 274350 - DNA, 25 bp, Probe sequence
gatgtatataaattaacgacgtcgt

SEQ ID NO: 274351 - DNA, 25 bp, Probe sequence
gatgtgatttttattggttttccaa

SEQ ID NO: 274352 - DNA, 25 bp, Probe sequence
gttttccaatttttcaagcttccat

SEQ ID NO: 274353 - DNA, 25 bp, Probe sequence
gtagcgacagcaggttctagtaaac

SEQ ID NO: 274354 - DNA, 25 bp, Probe sequence
ggggcgtcatcatgaatattgtatt

SEQ ID NO: 274355 - DNA, 25 bp, Probe sequence
ggaggggcgtcatcatgaatattgt

SEQ ID NO: 274356 - DNA, 25 bp, Probe sequence
tgcgaactgccaaagtacaacaaca

SEQ ID NO: 274357 - DNA, 25 bp, Probe sequence
tccacagtaggttctaaaacgagaa

SEQ ID NO: 274358 - DNA, 25 bp, Probe sequence
tttccaatttttcaagcttccatcc

SEQ ID NO: 274359 - DNA, 25 bp, Probe sequence
ttagcgttggaaagaattatctaga

SEQ ID NO: 274360 - DNA, 25 bp, Probe sequence
atatgattatgactttttcccattt

SEQ ID NO: 274361 - DNA, 25 bp, Probe sequence
atacagctcctataatatgggtgta

SEQ ID NO: 274362 - DNA, 25 bp, Probe sequence
atgattatgactttttcccatttaa

SEQ ID NO: 274363 - DNA, 25 bp, Probe sequence
agagatttgaaggtgcaaagtactc

SEQ ID NO: 274364 - DNA, 25 bp, Probe sequence
acagctcctataatatgggtgtatg

SEQ ID NO: 274365 - DNA, 25 bp, Probe sequence
aaatgtgacaggttatatcagtttc

SEQ ID NO: 274366 - DNA, 25 bp, Probe sequence
aaaaatgtgacaggttatatcagtt

SEQ ID NO: 274367 - DNA, 25 bp, Probe sequence
aaaatgtgacaggttatatcagttt

SEQ ID NO: 274368 - DNA, 25 bp, Probe sequence
aatgtgacaggttatatcagtttca

SEQ ID NO: 274369 - DNA, 25 bp, Probe sequence
aatacagctcctataatatgggtgt

SEQ ID NO: 274370 - DNA, 25 bp, Probe sequence
aatatgattatgactttttcccatt

SEQ ID NO: 274371 - DNA, 25 bp, Probe sequence
ctaattataatagattggagcatac

SEQ ID NO: 274372 - DNA, 25 bp, Probe sequence
ctgaatacagctcctataatatggg

SEQ ID NO: 274373 - DNA, 25 bp, Probe sequence
gaatatgattatgactttttcccat

SEQ ID NO: 274374 - DNA, 25 bp, Probe sequence
gaatacagctcctataatatgggtg

SEQ ID NO: 274375 - DNA, 25 bp, Probe sequence
gttaatgaggataagagatttgaag

SEQ ID NO: 274376 - DNA, 25 bp, Probe sequence
gtgaatatgattatgactttttccc

SEQ ID NO: 274377 - DNA, 25 bp, Probe sequence
ggtgaatatgattatgactttttcc

SEQ ID NO: 274378 - DNA, 25 bp, Probe sequence
tgattatgactttttcccatttaaa

SEQ ID NO: 274379 - DNA, 25 bp, Probe sequence
tgaatatgattatgactttttccca

SEQ ID NO: 274380 - DNA, 25 bp, Probe sequence
tgaatacagctcctataatatgggt

SEQ ID NO: 274381 - DNA, 25 bp, Probe sequence
taattataatagattggagcataca

SEQ ID NO: 274382 - DNA, 25 bp, Probe sequence
taaaaatgtgacaggttatatcagt

SEQ ID NO: 274383 - DNA, 25 bp, Probe sequence
tacagctcctataatatgggtgtat

SEQ ID NO: 274384 - DNA, 25 bp, Probe sequence
tacgtaataaaacaatctaattata

SEQ ID NO: 274385 - DNA, 25 bp, Probe sequence
tatgactttttcccatttaaaatag

SEQ ID NO: 274386 - DNA, 25 bp, Probe sequence
tatgattatgactttttcccattta

SEQ ID NO: 274387 - DNA, 25 bp, Probe sequence
ttacgtaataaaacaatctaattat

SEQ ID NO: 274388 - DNA, 25 bp, Probe sequence
attgaaggggatttcacttattatt

SEQ ID NO: 274389 - DNA, 25 bp, Probe sequence
atgactaaaatccctttcaatgaag

SEQ ID NO: 274390 - DNA, 25 bp, Probe sequence
atcatgactaaaatccctttcaatg

SEQ ID NO: 274391 - DNA, 25 bp, Probe sequence
atccctttcaatgaagcgaagcatg

SEQ ID NO: 274392 - DNA, 25 bp, Probe sequence
agtattgaaggggatttcacttatt

SEQ ID NO: 274393 - DNA, 25 bp, Probe sequence
agttaatcatgactaaaatcccttt

SEQ ID NO: 274394 - DNA, 25 bp, Probe sequence
aaagttaatcatgactaaaatccct

SEQ ID NO: 274395 - DNA, 25 bp, Probe sequence
actaaaatccctttcaatgaagcga

SEQ ID NO: 274396 - DNA, 25 bp, Probe sequence
aaatccctttcaatgaagcgaagca

SEQ ID NO: 274397 - DNA, 25 bp, Probe sequence
aaaatccctttcaatgaagcgaagc

SEQ ID NO: 274398 - DNA, 25 bp, Probe sequence
aagcgaagcatggtaataaattaag

SEQ ID NO: 274399 - DNA, 25 bp, Probe sequence
aagttaatcatgactaaaatccctt

SEQ ID NO: 274400 - DNA, 25 bp, Probe sequence
aatgtttattgttaagtattgaagg

SEQ ID NO: 274401 - DNA, 25 bp, Probe sequence
aatccctttcaatgaagcgaagcat

SEQ ID NO: 274402 - DNA, 25 bp, Probe sequence
aatcatgactaaaatccctttcaat

SEQ ID NO: 274403 - DNA, 25 bp, Probe sequence
aatatgcaaaagttaatcatgacta

SEQ ID NO: 274404 - DNA, 25 bp, Probe sequence
catgactaaaatccctttcaatgaa

SEQ ID NO: 274405 - DNA, 25 bp, Probe sequence
ctaaaatccctttcaatgaagcgaa

SEQ ID NO: 274406 - DNA, 25 bp, Probe sequence
ccctttcaatgaagcgaagcatggt

SEQ ID NO: 274407 - DNA, 25 bp, Probe sequence
cctttcaatgaagcgaagcatggta

SEQ ID NO: 274408 - DNA, 25 bp, Probe sequence
gactaaaatccctttcaatgaagcg

SEQ ID NO: 274409 - DNA, 25 bp, Probe sequence
gttaatcatgactaaaatccctttc

SEQ ID NO: 274410 - DNA, 25 bp, Probe sequence
gtattgaaggggatttcacttatta

SEQ ID NO: 274411 - DNA, 25 bp, Probe sequence
tgactaaaatccctttcaatgaagc

SEQ ID NO: 274412 - DNA, 25 bp, Probe sequence
tgaaggggatttcacttattattat

SEQ ID NO: 274413 - DNA, 25 bp, Probe sequence
tgaagcgaagcatggtaataaatta

SEQ ID NO: 274414 - DNA, 25 bp, Probe sequence
tccctttcaatgaagcgaagcatgg

SEQ ID NO: 274415 - DNA, 25 bp, Probe sequence
tcatgactaaaatccctttcaatga

SEQ ID NO: 274416 - DNA, 25 bp, Probe sequence
taatcatgactaaaatccctttcaa

SEQ ID NO: 274417 - DNA, 25 bp, Probe sequence
taaaatccctttcaatgaagcgaag

SEQ ID NO: 274418 - DNA, 25 bp, Probe sequence
taaattaagtttacaatgtttattg

SEQ ID NO: 274419 - DNA, 25 bp, Probe sequence
ttcaatgaagcgaagcatggtaata

SEQ ID NO: 274420 - DNA, 25 bp, Probe sequence
ttaatcatgactaaaatccctttca

SEQ ID NO: 274421 - DNA, 25 bp, Probe sequence
ttgaaggggatttcacttattatta

SEQ ID NO: 274422 - DNA, 25 bp, Probe sequence
attcctcttttagcattgacatatc

SEQ ID NO: 274423 - DNA, 25 bp, Probe sequence
atacgatgatgttaggtgccatctt

SEQ ID NO: 274424 - DNA, 25 bp, Probe sequence
aggtgtatttggaacaatcattttc

SEQ ID NO: 274425 - DNA, 25 bp, Probe sequence
agtattcctcttttagcattgacat

SEQ ID NO: 274426 - DNA, 25 bp, Probe sequence
acgatgatgttaggtgccatctttg

SEQ ID NO: 274427 - DNA, 25 bp, Probe sequence
acgggaactttgccattatcacaag

SEQ ID NO: 274428 - DNA, 25 bp, Probe sequence
actttgccattatcacaagtggacg

SEQ ID NO: 274429 - DNA, 25 bp, Probe sequence
aacgggaactttgccattatcacaa

SEQ ID NO: 274430 - DNA, 25 bp, Probe sequence
aaggtaggaaaaattatgcgcaaca

SEQ ID NO: 274431 - DNA, 25 bp, Probe sequence
cttaacgggaactttgccattatca

SEQ ID NO: 274432 - DNA, 25 bp, Probe sequence
cttttagcattgacatatctttttg

SEQ ID NO: 274433 - DNA, 25 bp, Probe sequence
gcttaacgggaactttgccattatc

SEQ ID NO: 274434 - DNA, 25 bp, Probe sequence
ctcatacgatgatgttaggtgccat

SEQ ID NO: 274435 - DNA, 25 bp, Probe sequence
ctcttttagcattgacatatctttt

SEQ ID NO: 274436 - DNA, 25 bp, Probe sequence
gaactttgccattatcacaagtgga

SEQ ID NO: 274437 - DNA, 25 bp, Probe sequence
gatgatgttaggtgccatctttgta

SEQ ID NO: 274438 - DNA, 25 bp, Probe sequence
ggcttaacgggaactttgccattat

SEQ ID NO: 274439 - DNA, 25 bp, Probe sequence
gtattcctcttttagcattgacata

SEQ ID NO: 274440 - DNA, 25 bp, Probe sequence
gtatttggaacaatcattttcctta

SEQ ID NO: 274441 - DNA, 25 bp, Probe sequence
gtaggaaaaattatgcgcaacaata

SEQ ID NO: 274442 - DNA, 25 bp, Probe sequence
gggaactttgccattatcacaagtg

SEQ ID NO: 274443 - DNA, 25 bp, Probe sequence
ggaactttgccattatcacaagtgg

SEQ ID NO: 274444 - DNA, 25 bp, Probe sequence
tgatgcaaaataagtttgttagtcc

SEQ ID NO: 274445 - DNA, 25 bp, Probe sequence
tgatgttaggtgccatctttgtatt

SEQ ID NO: 274446 - DNA, 25 bp, Probe sequence
tcctcttttagcattgacatatctt

SEQ ID NO: 274447 - DNA, 25 bp, Probe sequence
taacgggaactttgccattatcaca

SEQ ID NO: 274448 - DNA, 25 bp, Probe sequence
taagtattcctcttttagcattgac

SEQ ID NO: 274449 - DNA, 25 bp, Probe sequence
taaaactagtatttgctgttatttg

SEQ ID NO: 274450 - DNA, 25 bp, Probe sequence
tatttaagtattcctcttttagcat

SEQ ID NO: 274451 - DNA, 25 bp, Probe sequence
tattcctcttttagcattgacatat

SEQ ID NO: 274452 - DNA, 25 bp, Probe sequence
tttaagtattcctcttttagcattg

SEQ ID NO: 274453 - DNA, 25 bp, Probe sequence
ttttagcattgacatatctttttgc

SEQ ID NO: 274454 - DNA, 25 bp, Probe sequence
ttaacgggaactttgccattatcac

SEQ ID NO: 274455 - DNA, 25 bp, Probe sequence
ttggaacaatcattttccttatctt

SEQ ID NO: 274456 - DNA, 25 bp, Probe sequence
attgatccacaatccgcaaattata

SEQ ID NO: 274457 - DNA, 25 bp, Probe sequence
atatttatcaatttttagagtcatt

SEQ ID NO: 274458 - DNA, 25 bp, Probe sequence
atatgattgatccacaatccgcaaa

SEQ ID NO: 274459 - DNA, 25 bp, Probe sequence
atccacaatccgcaaattatatata

SEQ ID NO: 274460 - DNA, 25 bp, Probe sequence
atgattgatccacaatccgcaaatt

SEQ ID NO: 274461 - DNA, 25 bp, Probe sequence
aggtgccatttatgaaggcttttta

SEQ ID NO: 274462 - DNA, 25 bp, Probe sequence
agtgaagcattagatacgattaaag

SEQ ID NO: 274463 - DNA, 25 bp, Probe sequence
agagtcattagactggtcagaataa

SEQ ID NO: 274464 - DNA, 25 bp, Probe sequence
acaatatgattgatccacaatccgc

SEQ ID NO: 274465 - DNA, 25 bp, Probe sequence
aaactgaaggtgccatttatgaagg

SEQ ID NO: 274466 - DNA, 25 bp, Probe sequence
aaaactgaaggtgccatttatgaag

SEQ ID NO: 274467 - DNA, 25 bp, Probe sequence
aacgacaatatgattgatccacaat

SEQ ID NO: 274468 - DNA, 25 bp, Probe sequence
aaggtgccatttatgaaggcttttt

SEQ ID NO: 274469 - DNA, 25 bp, Probe sequence
aatatgattgatccacaatccgcaa

SEQ ID NO: 274470 - DNA, 25 bp, Probe sequence
caaaactgaaggtgccatttatgaa

SEQ ID NO: 274471 - DNA, 25 bp, Probe sequence
cacaatccgcaaattatatatatga

SEQ ID NO: 274472 - DNA, 25 bp, Probe sequence
ctgaaggtgccatttatgaaggctt

SEQ ID NO: 274473 - DNA, 25 bp, Probe sequence
gcaaaactgaaggtgccatttatga

SEQ ID NO: 274474 - DNA, 25 bp, Probe sequence
gaaggtgccatttatgaaggctttt

SEQ ID NO: 274475 - DNA, 25 bp, Probe sequence
gaaaacgacaatatgattgatccac

SEQ ID NO: 274476 - DNA, 25 bp, Probe sequence
gagatgtaaagggtattgtaacgat

SEQ ID NO: 274477 - DNA, 25 bp, Probe sequence
gatccacaatccgcaaattatatat

SEQ ID NO: 274478 - DNA, 25 bp, Probe sequence
gatatttatcaatttttagagtcat

SEQ ID NO: 274479 - DNA, 25 bp, Probe sequence
gtgccatttatgaaggctttttaga

SEQ ID NO: 274480 - DNA, 25 bp, Probe sequence
gggtggcaaaactgaaggtgccatt

SEQ ID NO: 274481 - DNA, 25 bp, Probe sequence
ggtgccatttatgaaggctttttag

SEQ ID NO: 274482 - DNA, 25 bp, Probe sequence
tgattgatccacaatccgcaaatta

SEQ ID NO: 274483 - DNA, 25 bp, Probe sequence
tgatccacaatccgcaaattatata

SEQ ID NO: 274484 - DNA, 25 bp, Probe sequence
tccacaatccgcaaattatatatat

SEQ ID NO: 274485 - DNA, 25 bp, Probe sequence
taaagggtattgtaacgatgtgtgc

SEQ ID NO: 274486 - DNA, 25 bp, Probe sequence
tatgattgatccacaatccgcaaat

SEQ ID NO: 274487 - DNA, 25 bp, Probe sequence
ttttagagtcattagactggtcaga

SEQ ID NO: 274488 - DNA, 25 bp, Probe sequence
ttagagtcattagactggtcagaat

SEQ ID NO: 274489 - DNA, 25 bp, Probe sequence
ttgatccacaatccgcaaattatat

SEQ ID NO: 274490 - DNA, 25 bp, Probe sequence
attggtatcctttcttgtcttatat

SEQ ID NO: 274491 - DNA, 25 bp, Probe sequence
attatggcgttaccaatgatttggt

SEQ ID NO: 274492 - DNA, 25 bp, Probe sequence
attatggttcttcccaggtgcaatc

SEQ ID NO: 274493 - DNA, 25 bp, Probe sequence
attattatggcgttaccaatgattt

SEQ ID NO: 274494 - DNA, 25 bp, Probe sequence
atcctttcttgtcttatatctttta

SEQ ID NO: 274495 - DNA, 25 bp, Probe sequence
atggttcttcccaggtgcaatcatg

SEQ ID NO: 274496 - DNA, 25 bp, Probe sequence
agcttcagcattatggttcttccca

SEQ ID NO: 274497 - DNA, 25 bp, Probe sequence
aatattattggtatcctttcttgtc

SEQ ID NO: 274498 - DNA, 25 bp, Probe sequence
aattttgactagaacttataatatt

SEQ ID NO: 274499 - DNA, 25 bp, Probe sequence
cagcattatggttcttcccaggtgc

SEQ ID NO: 274500 - DNA, 25 bp, Probe sequence
cttcagcattatggttcttcccagg

SEQ ID NO: 274501 - DNA, 25 bp, Probe sequence
cattatggttcttcccaggtgcaat

SEQ ID NO: 274502 - DNA, 25 bp, Probe sequence
cttcccaggtgcaatcatgatattg

SEQ ID NO: 274503 - DNA, 25 bp, Probe sequence
cctttcttgtcttatatcttttatt

SEQ ID NO: 274504 - DNA, 25 bp, Probe sequence
gcttcagcattatggttcttcccag

SEQ ID NO: 274505 - DNA, 25 bp, Probe sequence
gttcttcccaggtgcaatcatgata

SEQ ID NO: 274506 - DNA, 25 bp, Probe sequence
gtatcctttcttgtcttatatcttt

SEQ ID NO: 274507 - DNA, 25 bp, Probe sequence
ggtgtaattttgactagaacttata

SEQ ID NO: 274508 - DNA, 25 bp, Probe sequence
ggttcttcccaggtgcaatcatgat

SEQ ID NO: 274509 - DNA, 25 bp, Probe sequence
ggaggtgtaattttgactagaactt

SEQ ID NO: 274510 - DNA, 25 bp, Probe sequence
tggttcttcccaggtgcaatcatga

SEQ ID NO: 274511 - DNA, 25 bp, Probe sequence
tggtatcctttcttgtcttatatct

SEQ ID NO: 274512 - DNA, 25 bp, Probe sequence
tcagcattatggttcttcccaggtg

SEQ ID NO: 274513 - DNA, 25 bp, Probe sequence
tcttttattattatggcgttaccaa

SEQ ID NO: 274514 - DNA, 25 bp, Probe sequence
tcttcccaggtgcaatcatgatatt

SEQ ID NO: 274515 - DNA, 25 bp, Probe sequence
tatggttcttcccaggtgcaatcat

SEQ ID NO: 274516 - DNA, 25 bp, Probe sequence
tatcttttattattatggcgttacc

SEQ ID NO: 274517 - DNA, 25 bp, Probe sequence
tatctttagtcattgttttttgcta

SEQ ID NO: 274518 - DNA, 25 bp, Probe sequence
tattattggtatcctttcttgtctt

SEQ ID NO: 274519 - DNA, 25 bp, Probe sequence
tattggtatcctttcttgtcttata

SEQ ID NO: 274520 - DNA, 25 bp, Probe sequence
ttattggtatcctttcttgtcttat

SEQ ID NO: 274521 - DNA, 25 bp, Probe sequence
ttatggttcttcccaggtgcaatca

SEQ ID NO: 274522 - DNA, 25 bp, Probe sequence
ttcttgtcttatatcttttattatt

SEQ ID NO: 274523 - DNA, 25 bp, Probe sequence
ttggtatcctttcttgtcttatatc

SEQ ID NO: 274524 - DNA, 25 bp, Probe sequence
attaatttacttcaagcttttcttg

SEQ ID NO: 274525 - DNA, 25 bp, Probe sequence
attaatcctggaagtatatctcaat

SEQ ID NO: 274526 - DNA, 25 bp, Probe sequence
atatctcaatctagaagttcaatgg

SEQ ID NO: 274527 - DNA, 25 bp, Probe sequence
atctcaatctagaagttcaatggaa

SEQ ID NO: 274528 - DNA, 25 bp, Probe sequence
atcctggaagtatatctcaatctag

SEQ ID NO: 274529 - DNA, 25 bp, Probe sequence
atgcgattaatttacttcaagcttt

SEQ ID NO: 274530 - DNA, 25 bp, Probe sequence
atggacatttatatcaagtcaatcg

SEQ ID NO: 274531 - DNA, 25 bp, Probe sequence
agtatatctcaatctagaagttcaa

SEQ ID NO: 274532 - DNA, 25 bp, Probe sequence
agaatttgaaaatgaagcggtcgca

SEQ ID NO: 274533 - DNA, 25 bp, Probe sequence
actcatggacatttatatcaagtca

SEQ ID NO: 274534 - DNA, 25 bp, Probe sequence
acatttatatcaagtcaatcgaaca

SEQ ID NO: 274535 - DNA, 25 bp, Probe sequence
aagtatatctcaatctagaagttca

SEQ ID NO: 274536 - DNA, 25 bp, Probe sequence
aatcctggaagtatatctcaatcta

SEQ ID NO: 274537 - DNA, 25 bp, Probe sequence
catttatatcaagtcaatcgaacaa

SEQ ID NO: 274538 - DNA, 25 bp, Probe sequence
ctcaatctagaagttcaatggaaga

SEQ ID NO: 274539 - DNA, 25 bp, Probe sequence
ctggaagtatatctcaatctagaag

SEQ ID NO: 274540 - DNA, 25 bp, Probe sequence
cgattaatttacttcaagcttttct

SEQ ID NO: 274541 - DNA, 25 bp, Probe sequence
cctggaagtatatctcaatctagaa

SEQ ID NO: 274542 - DNA, 25 bp, Probe sequence
gcgattaatttacttcaagcttttc

SEQ ID NO: 274543 - DNA, 25 bp, Probe sequence
gaatttgaaaatgaagcggtcgcaa

SEQ ID NO: 274544 - DNA, 25 bp, Probe sequence
gaagtatatctcaatctagaagttc

SEQ ID NO: 274545 - DNA, 25 bp, Probe sequence
gacatttatatcaagtcaatcgaac

SEQ ID NO: 274546 - DNA, 25 bp, Probe sequence
gattaatttacttcaagcttttctt

SEQ ID NO: 274547 - DNA, 25 bp, Probe sequence
gtatatctcaatctagaagttcaat

SEQ ID NO: 274548 - DNA, 25 bp, Probe sequence
ggacatttatatcaagtcaatcgaa

SEQ ID NO: 274549 - DNA, 25 bp, Probe sequence
ggaagtatatctcaatctagaagtt

SEQ ID NO: 274550 - DNA, 25 bp, Probe sequence
tggacatttatatcaagtcaatcga

SEQ ID NO: 274551 - DNA, 25 bp, Probe sequence
tgcgattaatttacttcaagctttt

SEQ ID NO: 274552 - DNA, 25 bp, Probe sequence
tcctggaagtatatctcaatctaga

SEQ ID NO: 274553 - DNA, 25 bp, Probe sequence
taatcctggaagtatatctcaatct

SEQ ID NO: 274554 - DNA, 25 bp, Probe sequence
tatgagtatattaatggtgttcatg

SEQ ID NO: 274555 - DNA, 25 bp, Probe sequence
tttgaaaatgaagcggtcgcaaaat

SEQ ID NO: 274556 - DNA, 25 bp, Probe sequence
tttatatcaagtcaatcgaacaaga

SEQ ID NO: 274557 - DNA, 25 bp, Probe sequence
ttaatcctggaagtatatctcaatc

SEQ ID NO: 274558 - DNA, 25 bp, Probe sequence
attcaggggtgccgtatcagaccgt

SEQ ID NO: 274559 - DNA, 25 bp, Probe sequence
attatcaacgctattcaatctttgt

SEQ ID NO: 274560 - DNA, 25 bp, Probe sequence
atatcgaaaaattcaggggtgccgt

SEQ ID NO: 274561 - DNA, 25 bp, Probe sequence
atcagaccgtacaagatttgaggaa

SEQ ID NO: 274562 - DNA, 25 bp, Probe sequence
atcaacgctattcaatctttgtttg

SEQ ID NO: 274563 - DNA, 25 bp, Probe sequence
atgacagagttgaatgaaattatca

SEQ ID NO: 274564 - DNA, 25 bp, Probe sequence
aaattcaggggtgccgtatcagacc

SEQ ID NO: 274565 - DNA, 25 bp, Probe sequence
aaattatcaacgctattcaatcttt

SEQ ID NO: 274566 - DNA, 25 bp, Probe sequence
aaaaattcaggggtgccgtatcaga

SEQ ID NO: 274567 - DNA, 25 bp, Probe sequence
aaaattcaggggtgccgtatcagac

SEQ ID NO: 274568 - DNA, 25 bp, Probe sequence
aactatatagttattatacatcatt

SEQ ID NO: 274569 - DNA, 25 bp, Probe sequence
aattcaggggtgccgtatcagaccg

SEQ ID NO: 274570 - DNA, 25 bp, Probe sequence
aattatcaacgctattcaatctttg

SEQ ID NO: 274571 - DNA, 25 bp, Probe sequence
caatcaggctacaaaatatcgaaaa

SEQ ID NO: 274572 - DNA, 25 bp, Probe sequence
caagatttgaggaatggtaaaacga

SEQ ID NO: 274573 - DNA, 25 bp, Probe sequence
cagaccgtacaagatttgaggaatg

SEQ ID NO: 274574 - DNA, 25 bp, Probe sequence
ctcaatcaggctacaaaatatcgaa

SEQ ID NO: 274575 - DNA, 25 bp, Probe sequence
ccgtatcagaccgtacaagatttga

SEQ ID NO: 274576 - DNA, 25 bp, Probe sequence
gccgtatcagaccgtacaagatttg

SEQ ID NO: 274577 - DNA, 25 bp, Probe sequence
gaaaaattcaggggtgccgtatcag

SEQ ID NO: 274578 - DNA, 25 bp, Probe sequence
gaaattatcaacgctattcaatctt

SEQ ID NO: 274579 - DNA, 25 bp, Probe sequence
gaccgtacaagatttgaggaatggt

SEQ ID NO: 274580 - DNA, 25 bp, Probe sequence
gagtctcaatcaggctacaaaatat

SEQ ID NO: 274581 - DNA, 25 bp, Probe sequence
gtatcagaccgtacaagatttgagg

SEQ ID NO: 274582 - DNA, 25 bp, Probe sequence
gtttgagtctcaatcaggctacaaa

SEQ ID NO: 274583 - DNA, 25 bp, Probe sequence
gtctcaatcaggctacaaaatatcg

SEQ ID NO: 274584 - DNA, 25 bp, Probe sequence
gtgccgtatcagaccgtacaagatt

SEQ ID NO: 274585 - DNA, 25 bp, Probe sequence
tcgaaaaattcaggggtgccgtatc

SEQ ID NO: 274586 - DNA, 25 bp, Probe sequence
tgtttgagtctcaatcaggctacaa

SEQ ID NO: 274587 - DNA, 25 bp, Probe sequence
tgccgtatcagaccgtacaagattt

SEQ ID NO: 274588 - DNA, 25 bp, Probe sequence
tacatcattaaaagagcagtcataa

SEQ ID NO: 274589 - DNA, 25 bp, Probe sequence
tatcaacgctattcaatctttgttt

SEQ ID NO: 274590 - DNA, 25 bp, Probe sequence
ttatcaacgctattcaatctttgtt

SEQ ID NO: 274591 - DNA, 25 bp, Probe sequence
ttgagtctcaatcaggctacaaaat

SEQ ID NO: 274592 - DNA, 25 bp, Probe sequence
attcaggagttccatatcaaacagt

SEQ ID NO: 274593 - DNA, 25 bp, Probe sequence
attataaactctcttcaatctttgt

SEQ ID NO: 274594 - DNA, 25 bp, Probe sequence
atttcgaaaaattcaggagttccat

SEQ ID NO: 274595 - DNA, 25 bp, Probe sequence
atattataaactctcttcaatcttt

SEQ ID NO: 274596 - DNA, 25 bp, Probe sequence
atagttactatgtctcattaaaaga

SEQ ID NO: 274597 - DNA, 25 bp, Probe sequence
ataaactctcttcaatctttgtttg

SEQ ID NO: 274598 - DNA, 25 bp, Probe sequence
ataatattataaactctcttcaatc

SEQ ID NO: 274599 - DNA, 25 bp, Probe sequence
aggagttccatatcaaacagtacaa

SEQ ID NO: 274600 - DNA, 25 bp, Probe sequence
aaactttatagttactatgtctcat

SEQ ID NO: 274601 - DNA, 25 bp, Probe sequence
aaaattcaggagttccatatcaaac

SEQ ID NO: 274602 - DNA, 25 bp, Probe sequence
aactttatagttactatgtctcatt

SEQ ID NO: 274603 - DNA, 25 bp, Probe sequence
aatattataaactctcttcaatctt

SEQ ID NO: 274604 - DNA, 25 bp, Probe sequence
aattcaggagttccatatcaaacag

SEQ ID NO: 274605 - DNA, 25 bp, Probe sequence
caggagttccatatcaaacagtaca

SEQ ID NO: 274606 - DNA, 25 bp, Probe sequence
catatcaaacagtacaagatttaag

SEQ ID NO: 274607 - DNA, 25 bp, Probe sequence
gaataatattataaactctcttcaa

SEQ ID NO: 274608 - DNA, 25 bp, Probe sequence
gaatcaggctataaaatttcgaaaa

SEQ ID NO: 274609 - DNA, 25 bp, Probe sequence
gaaaaattcaggagttccatatcaa

SEQ ID NO: 274610 - DNA, 25 bp, Probe sequence
gagttccatatcaaacagtacaaga

SEQ ID NO: 274611 - DNA, 25 bp, Probe sequence
gttccatatcaaacagtacaagatt

SEQ ID NO: 274612 - DNA, 25 bp, Probe sequence
gttactatgtctcattaaaagaaca

SEQ ID NO: 274613 - DNA, 25 bp, Probe sequence
gtttgagtctgaatcaggctataaa

SEQ ID NO: 274614 - DNA, 25 bp, Probe sequence
gtctgaatcaggctataaaatttcg

SEQ ID NO: 274615 - DNA, 25 bp, Probe sequence
gggaaaaccaaactagaagatgcta

SEQ ID NO: 274616 - DNA, 25 bp, Probe sequence
ggagttccatatcaaacagtacaag

SEQ ID NO: 274617 - DNA, 25 bp, Probe sequence
tgtttgagtctgaatcaggctataa

SEQ ID NO: 274618 - DNA, 25 bp, Probe sequence
tcaggagttccatatcaaacagtac

SEQ ID NO: 274619 - DNA, 25 bp, Probe sequence
taatattataaactctcttcaatct

SEQ ID NO: 274620 - DNA, 25 bp, Probe sequence
tagaacgattattaaactttatagt

SEQ ID NO: 274621 - DNA, 25 bp, Probe sequence
tataaactctcttcaatctttgttt

SEQ ID NO: 274622 - DNA, 25 bp, Probe sequence
tattataaactctcttcaatctttg

SEQ ID NO: 274623 - DNA, 25 bp, Probe sequence
ttataaactctcttcaatctttgtt

SEQ ID NO: 274624 - DNA, 25 bp, Probe sequence
ttatagttactatgtctcattaaaa

SEQ ID NO: 274625 - DNA, 25 bp, Probe sequence
ttcaggagttccatatcaaacagta

SEQ ID NO: 274626 - DNA, 25 bp, Probe sequence
attggacaacaatggacagaaccta

SEQ ID NO: 274627 - DNA, 25 bp, Probe sequence
atttccagaacaagcaaacggcagt

SEQ ID NO: 274628 - DNA, 25 bp, Probe sequence
atttccatggacgtatcagtgcagt

SEQ ID NO: 274629 - DNA, 25 bp, Probe sequence
atgcggatttatcttcccgctgact

SEQ ID NO: 274630 - DNA, 25 bp, Probe sequence
agtgatgcggtgaccgcttctggct

SEQ ID NO: 274631 - DNA, 25 bp, Probe sequence
aaagaaagtggcggacctgcttcag

SEQ ID NO: 274632 - DNA, 25 bp, Probe sequence
aaactacggcaattcaaatcctgaa

SEQ ID NO: 274633 - DNA, 25 bp, Probe sequence
aatgtcttaaaattgaatatcactt

SEQ ID NO: 274634 - DNA, 25 bp, Probe sequence
aatttcaagtgatgcggtgaccgct

SEQ ID NO: 274635 - DNA, 25 bp, Probe sequence
caagcatcaccaatggcagatgatt

SEQ ID NO: 274636 - DNA, 25 bp, Probe sequence
caactctttgtctaaaaggaggaca

SEQ ID NO: 274637 - DNA, 25 bp, Probe sequence
gcgcttggacaagtattatttccag

SEQ ID NO: 274638 - DNA, 25 bp, Probe sequence
gcttctggctctggtttagacccag

SEQ ID NO: 274639 - DNA, 25 bp, Probe sequence
gcttcaaaaattaatcaccttattg

SEQ ID NO: 274640 - DNA, 25 bp, Probe sequence
gcagtcaattacaatatgaatgcga

SEQ ID NO: 274641 - DNA, 25 bp, Probe sequence
gcaaacggcagtttagtgaaacaag

SEQ ID NO: 274642 - DNA, 25 bp, Probe sequence
gaaacaacaagtaaaacgcattgcg

SEQ ID NO: 274643 - DNA, 25 bp, Probe sequence
gaaaacaaacaagcatcaccaatgg

SEQ ID NO: 274644 - DNA, 25 bp, Probe sequence
gactgtcacagcgcttggacaagta

SEQ ID NO: 274645 - DNA, 25 bp, Probe sequence
gatattacggttgacaatgcgaaac

SEQ ID NO: 274646 - DNA, 25 bp, Probe sequence
gtttaggactagtactgattatgtt

SEQ ID NO: 274647 - DNA, 25 bp, Probe sequence
gtttgttttatgcggatttatcttc

SEQ ID NO: 274648 - DNA, 25 bp, Probe sequence
gtactgattatgtttgttttatgcg

SEQ ID NO: 274649 - DNA, 25 bp, Probe sequence
gtaattggttcaaagctcattggac

SEQ ID NO: 274650 - DNA, 25 bp, Probe sequence
ggttcaaagctcattggacaacaat

SEQ ID NO: 274651 - DNA, 25 bp, Probe sequence
ggaggacaaaacaatgcagacaata

SEQ ID NO: 274652 - DNA, 25 bp, Probe sequence
ggacgtatcagtgcagtcaattaca

SEQ ID NO: 274653 - DNA, 25 bp, Probe sequence
ggacagaacctaaatatttccatgg

SEQ ID NO: 274654 - DNA, 25 bp, Probe sequence
ggcagatgattatgttaatgtctta

SEQ ID NO: 274655 - DNA, 25 bp, Probe sequence
ggctcaaactacggcaattcaaatc

SEQ ID NO: 274656 - DNA, 25 bp, Probe sequence
tgaatatcactttagataaactcta

SEQ ID NO: 274657 - DNA, 25 bp, Probe sequence
tcccgctgactgtcacagcgcttgg

SEQ ID NO: 274658 - DNA, 25 bp, Probe sequence
ttagacccagatattacggttgaca

SEQ ID NO: 274659 - DNA, 25 bp, Probe sequence
ttcaggcggctcaaactacggcaat

SEQ ID NO: 274660 - DNA, 25 bp, Probe sequence
atttgaaaacagagatcatacagtg

SEQ ID NO: 274661 - DNA, 25 bp, Probe sequence
atcatacagtgtatgtgttatggaa

SEQ ID NO: 274662 - DNA, 25 bp, Probe sequence
agagatcatacagtgtatgtgttat

SEQ ID NO: 274663 - DNA, 25 bp, Probe sequence
acagagatcatacagtgtatgtgtt

SEQ ID NO: 274664 - DNA, 25 bp, Probe sequence
aaacagagatcatacagtgtatgtg

SEQ ID NO: 274665 - DNA, 25 bp, Probe sequence
aaaacagagatcatacagtgtatgt

SEQ ID NO: 274666 - DNA, 25 bp, Probe sequence
aacagagatcatacagtgtatgtgt

SEQ ID NO: 274667 - DNA, 25 bp, Probe sequence
aatatgtgcatcggcaatttgaaaa

SEQ ID NO: 274668 - DNA, 25 bp, Probe sequence
aatttgaaaacagagatcatacagt

SEQ ID NO: 274669 - DNA, 25 bp, Probe sequence
caatttgaaaacagagatcatacag

SEQ ID NO: 274670 - DNA, 25 bp, Probe sequence
gcaatttgaaaacagagatcataca

SEQ ID NO: 274671 - DNA, 25 bp, Probe sequence
caaaaatatgtgcatcggcaatttg

SEQ ID NO: 274672 - DNA, 25 bp, Probe sequence
cagagatcatacagtgtatgtgtta

SEQ ID NO: 274673 - DNA, 25 bp, Probe sequence
cggcaatttgaaaacagagatcata

SEQ ID NO: 274674 - DNA, 25 bp, Probe sequence
gcaagaaaagggaaagttacatcct

SEQ ID NO: 274675 - DNA, 25 bp, Probe sequence
gaaaacagagatcatacagtgtatg

SEQ ID NO: 274676 - DNA, 25 bp, Probe sequence
gagatcatacagtgtatgtgttatg

SEQ ID NO: 274677 - DNA, 25 bp, Probe sequence
gatcatacagtgtatgtgttatgga

SEQ ID NO: 274678 - DNA, 25 bp, Probe sequence
ggcaatttgaaaacagagatcatac

SEQ ID NO: 274679 - DNA, 25 bp, Probe sequence
tgaaaacagagatcatacagtgtat

SEQ ID NO: 274680 - DNA, 25 bp, Probe sequence
tcatacagtgtatgtgttatggaat

SEQ ID NO: 274681 - DNA, 25 bp, Probe sequence
tttgaaaacagagatcatacagtgt

SEQ ID NO: 274682 - DNA, 25 bp, Probe sequence
ttgaaaacagagatcatacagtgta

SEQ ID NO: 274683 - DNA, 25 bp, Probe sequence
tgagtaaaggggggtggtacctatg

SEQ ID NO: 274684 - DNA, 25 bp, Probe sequence
attgtgatatctattgcaaacgcat

SEQ ID NO: 274685 - DNA, 25 bp, Probe sequence
atctattgcaaacgcattacattta

SEQ ID NO: 274686 - DNA, 25 bp, Probe sequence
atggcattacttaacacttttgaaa

SEQ ID NO: 274687 - DNA, 25 bp, Probe sequence
acctatggcattacttaacactttt

SEQ ID NO: 274688 - DNA, 25 bp, Probe sequence
aaagcctattgtgatatctattgca

SEQ ID NO: 274689 - DNA, 25 bp, Probe sequence
taagtttcggtatgtttatcgtcac

SEQ ID NO: 274690 - DNA, 25 bp, Probe sequence
aagtttcggtatgtttatcgtcact

SEQ ID NO: 274691 - DNA, 25 bp, Probe sequence
aaggaaaagcctattgtgatatcta

SEQ ID NO: 274692 - DNA, 25 bp, Probe sequence
taaaggggggtggtacctatggcat

SEQ ID NO: 274693 - DNA, 25 bp, Probe sequence
ctattgcaaacgcattacatttaat

SEQ ID NO: 274694 - DNA, 25 bp, Probe sequence
ctatggcattacttaacacttttga

SEQ ID NO: 274695 - DNA, 25 bp, Probe sequence
cggtatgtttatcgtcactttcatt

SEQ ID NO: 274696 - DNA, 25 bp, Probe sequence
gcctattgtgatatctattgcaaac

SEQ ID NO: 274697 - DNA, 25 bp, Probe sequence
gcattacttaacacttttgaaagga

SEQ ID NO: 274698 - DNA, 25 bp, Probe sequence
gcaaacgcattacatttaatgttaa

SEQ ID NO: 274699 - DNA, 25 bp, Probe sequence
gatatctattgcaaacgcattacat

SEQ ID NO: 274700 - DNA, 25 bp, Probe sequence
gtttcggtatgtttatcgtcacttt

SEQ ID NO: 274701 - DNA, 25 bp, Probe sequence
gtatgtttatcgtcactttcattgg

SEQ ID NO: 274702 - DNA, 25 bp, Probe sequence
gtacctatggcattacttaacactt

SEQ ID NO: 274703 - DNA, 25 bp, Probe sequence
gtgatatctattgcaaacgcattac

SEQ ID NO: 274704 - DNA, 25 bp, Probe sequence
gtggtacctatggcattacttaaca

SEQ ID NO: 274705 - DNA, 25 bp, Probe sequence
ggggtggtacctatggcattactta

SEQ ID NO: 274706 - DNA, 25 bp, Probe sequence
gggtggtacctatggcattacttaa

SEQ ID NO: 274707 - DNA, 25 bp, Probe sequence
ggtggtacctatggcattacttaac

SEQ ID NO: 274708 - DNA, 25 bp, Probe sequence
ggtacctatggcattacttaacact

SEQ ID NO: 274709 - DNA, 25 bp, Probe sequence
ggtatgtttatcgtcactttcattg

SEQ ID NO: 274710 - DNA, 25 bp, Probe sequence
ggaaaagcctattgtgatatctatt

SEQ ID NO: 274711 - DNA, 25 bp, Probe sequence
tcggtatgtttatcgtcactttcat

SEQ ID NO: 274712 - DNA, 25 bp, Probe sequence
taatgttaagtttcggtatgtttat

SEQ ID NO: 274713 - DNA, 25 bp, Probe sequence
tacctatggcattacttaacacttt

SEQ ID NO: 274714 - DNA, 25 bp, Probe sequence
tatgtttatcgtcactttcattggt

SEQ ID NO: 274715 - DNA, 25 bp, Probe sequence
tttcggtatgtttatcgtcactttc

SEQ ID NO: 274716 - DNA, 25 bp, Probe sequence
ttcggtatgtttatcgtcactttca

SEQ ID NO: 274717 - DNA, 25 bp, Probe sequence
attagtgtggggcgtttcatttttg

SEQ ID NO: 274718 - DNA, 25 bp, Probe sequence
attacagtccgatggttatgatgca

SEQ ID NO: 274719 - DNA, 25 bp, Probe sequence
atgatgcatttacatataatatgat

SEQ ID NO: 274720 - DNA, 25 bp, Probe sequence
agtgtattagtgtggggcgtttcat

SEQ ID NO: 274721 - DNA, 25 bp, Probe sequence
agtccgatggttatgatgcatttac

SEQ ID NO: 274722 - DNA, 25 bp, Probe sequence
acagtccgatggttatgatgcattt

SEQ ID NO: 274723 - DNA, 25 bp, Probe sequence
aaaattacagtccgatggttatgat

SEQ ID NO: 274724 - DNA, 25 bp, Probe sequence
aagtagttggaagtgtattagtgtg

SEQ ID NO: 274725 - DNA, 25 bp, Probe sequence
aagtgtattagtgtggggcgtttca

SEQ ID NO: 274726 - DNA, 25 bp, Probe sequence
aattacagtccgatggttatgatgc

SEQ ID NO: 274727 - DNA, 25 bp, Probe sequence
cgtttcatttttgttcgcatttatg

SEQ ID NO: 274728 - DNA, 25 bp, Probe sequence
gcgtttcatttttgttcgcatttat

SEQ ID NO: 274729 - DNA, 25 bp, Probe sequence
gatggttatgatgcatttacatata

SEQ ID NO: 274730 - DNA, 25 bp, Probe sequence
gttggaagtgtattagtgtggggcg

SEQ ID NO: 274731 - DNA, 25 bp, Probe sequence
gtttcatttttgttcgcatttatga

SEQ ID NO: 274732 - DNA, 25 bp, Probe sequence
gtattagtgtggggcgtttcatttt

SEQ ID NO: 274733 - DNA, 25 bp, Probe sequence
gtccgatggttatgatgcatttaca

SEQ ID NO: 274734 - DNA, 25 bp, Probe sequence
gtgtattagtgtggggcgtttcatt

SEQ ID NO: 274735 - DNA, 25 bp, Probe sequence
gtggggcgtttcatttttgttcgca

SEQ ID NO: 274736 - DNA, 25 bp, Probe sequence
gtgtggggcgtttcatttttgttcg

SEQ ID NO: 274737 - DNA, 25 bp, Probe sequence
gggcgtttcatttttgttcgcattt

SEQ ID NO: 274738 - DNA, 25 bp, Probe sequence
ggggcgtttcatttttgttcgcatt

SEQ ID NO: 274739 - DNA, 25 bp, Probe sequence
ggaagtgtattagtgtggggcgttt

SEQ ID NO: 274740 - DNA, 25 bp, Probe sequence
ggcgtttcatttttgttcgcattta

SEQ ID NO: 274741 - DNA, 25 bp, Probe sequence
tggggcgtttcatttttgttcgcat

SEQ ID NO: 274742 - DNA, 25 bp, Probe sequence
tgtggggcgtttcatttttgttcgc

SEQ ID NO: 274743 - DNA, 25 bp, Probe sequence
tccgatggttatgatgcatttacat

SEQ ID NO: 274744 - DNA, 25 bp, Probe sequence
taatttaaaattacagtccgatggt

SEQ ID NO: 274745 - DNA, 25 bp, Probe sequence
tacagtccgatggttatgatgcatt

SEQ ID NO: 274746 - DNA, 25 bp, Probe sequence
tagtgtggggcgtttcatttttgtt

SEQ ID NO: 274747 - DNA, 25 bp, Probe sequence
tattagtgtggggcgtttcattttt

SEQ ID NO: 274748 - DNA, 25 bp, Probe sequence
tttcatttttgttcgcatttatgaa

SEQ ID NO: 274749 - DNA, 25 bp, Probe sequence
ttagtgtggggcgtttcatttttgt

SEQ ID NO: 274750 - DNA, 25 bp, Probe sequence
ttaaaattacagtccgatggttatg

SEQ ID NO: 274751 - DNA, 25 bp, Probe sequence
attccaagaagtcaggaaatttgaa

SEQ ID NO: 274752 - DNA, 25 bp, Probe sequence
attaagattccaagaagtcaggaaa

SEQ ID NO: 274753 - DNA, 25 bp, Probe sequence
ataaaattaagattccaagaagtca

SEQ ID NO: 274754 - DNA, 25 bp, Probe sequence
agttaaaatcatgaatcgtatacat

SEQ ID NO: 274755 - DNA, 25 bp, Probe sequence
agattccaagaagtcaggaaatttg

SEQ ID NO: 274756 - DNA, 25 bp, Probe sequence
aaattaagattccaagaagtcagga

SEQ ID NO: 274757 - DNA, 25 bp, Probe sequence
aaatcatgaatcgtatacatattta

SEQ ID NO: 274758 - DNA, 25 bp, Probe sequence
aaaatcatgaatcgtatacatattt

SEQ ID NO: 274759 - DNA, 25 bp, Probe sequence
aaaattaagattccaagaagtcagg

SEQ ID NO: 274760 - DNA, 25 bp, Probe sequence
aagattccaagaagtcaggaaattt

SEQ ID NO: 274761 - DNA, 25 bp, Probe sequence
aatcatgaatcgtatacatatttaa

SEQ ID NO: 274762 - DNA, 25 bp, Probe sequence
aattaagattccaagaagtcaggaa

SEQ ID NO: 274763 - DNA, 25 bp, Probe sequence
caagaagtcaggaaatttgaaattt

SEQ ID NO: 274764 - DNA, 25 bp, Probe sequence
ccaagaagtcaggaaatttgaaatt

SEQ ID NO: 274765 - DNA, 25 bp, Probe sequence
gattatttggttaaaagtgtattat

SEQ ID NO: 274766 - DNA, 25 bp, Probe sequence
gattccaagaagtcaggaaatttga

SEQ ID NO: 274767 - DNA, 25 bp, Probe sequence
gttgattatttggttaaaagtgtat

SEQ ID NO: 274768 - DNA, 25 bp, Probe sequence
gttaaaatcatgaatcgtatacata

SEQ ID NO: 274769 - DNA, 25 bp, Probe sequence
gtataaaattaagattccaagaagt

SEQ ID NO: 274770 - DNA, 25 bp, Probe sequence
tgattatttggttaaaagtgtatta

SEQ ID NO: 274771 - DNA, 25 bp, Probe sequence
tgttgattatttggttaaaagtgta

SEQ ID NO: 274772 - DNA, 25 bp, Probe sequence
tccaagaagtcaggaaatttgaaat

SEQ ID NO: 274773 - DNA, 25 bp, Probe sequence
taagattccaagaagtcaggaaatt

SEQ ID NO: 274774 - DNA, 25 bp, Probe sequence
taaaattaagattccaagaagtcag

SEQ ID NO: 274775 - DNA, 25 bp, Probe sequence
taaaatcatgaatcgtatacatatt

SEQ ID NO: 274776 - DNA, 25 bp, Probe sequence
tagttaaaatcatgaatcgtataca

SEQ ID NO: 274777 - DNA, 25 bp, Probe sequence
tataaaattaagattccaagaagtc

SEQ ID NO: 274778 - DNA, 25 bp, Probe sequence
tttagttaaaatcatgaatcgtata

SEQ ID NO: 274779 - DNA, 25 bp, Probe sequence
ttgattatttggttaaaagtgtatt

SEQ ID NO: 274780 - DNA, 25 bp, Probe sequence
ttagttaaaatcatgaatcgtatac

SEQ ID NO: 274781 - DNA, 25 bp, Probe sequence
ttaagattccaagaagtcaggaaat

SEQ ID NO: 274782 - DNA, 25 bp, Probe sequence
ttaaaatcatgaatcgtatacatat

SEQ ID NO: 274783 - DNA, 25 bp, Probe sequence
attatgtttatgatttgtgctttta

SEQ ID NO: 274784 - DNA, 25 bp, Probe sequence
atttgtgcttttataagtagaagta

SEQ ID NO: 274785 - DNA, 25 bp, Probe sequence
ataagtagaagtaatgatcgacgta

SEQ ID NO: 274786 - DNA, 25 bp, Probe sequence
atgatttgtgcttttataagtagaa

SEQ ID NO: 274787 - DNA, 25 bp, Probe sequence
atgtttatgatttgtgcttttataa

SEQ ID NO: 274788 - DNA, 25 bp, Probe sequence
agtagaagtaatgatcgacgtaaaa

SEQ ID NO: 274789 - DNA, 25 bp, Probe sequence
agaagtaatgatcgacgtaaaaata

SEQ ID NO: 274790 - DNA, 25 bp, Probe sequence
aagtagaagtaatgatcgacgtaaa

SEQ ID NO: 274791 - DNA, 25 bp, Probe sequence
gatttgtgcttttataagtagaagt

SEQ ID NO: 274792 - DNA, 25 bp, Probe sequence
gtttatgatttgtgcttttataagt

SEQ ID NO: 274793 - DNA, 25 bp, Probe sequence
gtagaagtaatgatcgacgtaaaaa

SEQ ID NO: 274794 - DNA, 25 bp, Probe sequence
gtgcttttataagtagaagtaatga

SEQ ID NO: 274795 - DNA, 25 bp, Probe sequence
tgtgcttttataagtagaagtaatg

SEQ ID NO: 274796 - DNA, 25 bp, Probe sequence
tgtttatgatttgtgcttttataag

SEQ ID NO: 274797 - DNA, 25 bp, Probe sequence
tgatttgtgcttttataagtagaag

SEQ ID NO: 274798 - DNA, 25 bp, Probe sequence
taagtagaagtaatgatcgacgtaa

SEQ ID NO: 274799 - DNA, 25 bp, Probe sequence
tagaagtaatgatcgacgtaaaaat

SEQ ID NO: 274800 - DNA, 25 bp, Probe sequence
tatgatttgtgcttttataagtaga

SEQ ID NO: 274801 - DNA, 25 bp, Probe sequence
tatgtttatgatttgtgcttttata

SEQ ID NO: 274802 - DNA, 25 bp, Probe sequence
tataagtagaagtaatgatcgacgt

SEQ ID NO: 274803 - DNA, 25 bp, Probe sequence
tttgtgcttttataagtagaagtaa

SEQ ID NO: 274804 - DNA, 25 bp, Probe sequence
tttatgatttgtgcttttataagta

SEQ ID NO: 274805 - DNA, 25 bp, Probe sequence
ttatgatttgtgcttttataagtag

SEQ ID NO: 274806 - DNA, 25 bp, Probe sequence
ttatgtttatgatttgtgcttttat

SEQ ID NO: 274807 - DNA, 25 bp, Probe sequence
ttgaaacatctaacaaaaatatttg

SEQ ID NO: 274808 - DNA, 25 bp, Probe sequence
ttgtgcttttataagtagaagtaat

SEQ ID NO: 274809 - DNA, 25 bp, Probe sequence
atttgcaactacactacttctttta

SEQ ID NO: 274810 - DNA, 25 bp, Probe sequence
ataatttgcaactacactacttctt

SEQ ID NO: 274811 - DNA, 25 bp, Probe sequence
atgcctattaacacaatcagcaata

SEQ ID NO: 274812 - DNA, 25 bp, Probe sequence
agaaatgcatttcacaacataccat

SEQ ID NO: 274813 - DNA, 25 bp, Probe sequence
acgtcactaagtgggtgtagttata

SEQ ID NO: 274814 - DNA, 25 bp, Probe sequence
actacactacttcttttactaatat

SEQ ID NO: 274815 - DNA, 25 bp, Probe sequence
acttcttttactaatattaatgtct

SEQ ID NO: 274816 - DNA, 25 bp, Probe sequence
aacacaatcagcaatagttgacgag

SEQ ID NO: 274817 - DNA, 25 bp, Probe sequence
aatgcatttcacaacataccattgt

SEQ ID NO: 274818 - DNA, 25 bp, Probe sequence
aatcagcaatagttgacgagacgga

SEQ ID NO: 274819 - DNA, 25 bp, Probe sequence
aatttgcaactacactacttctttt

SEQ ID NO: 274820 - DNA, 25 bp, Probe sequence
caactacactacttcttttactaat

SEQ ID NO: 274821 - DNA, 25 bp, Probe sequence
caatatgcctattaacacaatcagc

SEQ ID NO: 274822 - DNA, 25 bp, Probe sequence
cactacttcttttactaatattaat

SEQ ID NO: 274823 - DNA, 25 bp, Probe sequence
catttttgttacgtcactaagtggg

SEQ ID NO: 274824 - DNA, 25 bp, Probe sequence
ccatttttattgttttggatgataa

SEQ ID NO: 274825 - DNA, 25 bp, Probe sequence
gcaactacactacttcttttactaa

SEQ ID NO: 274826 - DNA, 25 bp, Probe sequence
gcaatagttgacgagacggaaataa

SEQ ID NO: 274827 - DNA, 25 bp, Probe sequence
gaagtcgtagttaagaaatgcattt

SEQ ID NO: 274828 - DNA, 25 bp, Probe sequence
gagccgagttttgatattttcatta

SEQ ID NO: 274829 - DNA, 25 bp, Probe sequence
gagatgagccgagttttgatatttt

SEQ ID NO: 274830 - DNA, 25 bp, Probe sequence
gagttttgatattttcattagaatc

SEQ ID NO: 274831 - DNA, 25 bp, Probe sequence
gatgagccgagttttgatattttca

SEQ ID NO: 274832 - DNA, 25 bp, Probe sequence
gatgataaactctttttggaatttt

SEQ ID NO: 274833 - DNA, 25 bp, Probe sequence
gttacgtcactaagtgggtgtagtt

SEQ ID NO: 274834 - DNA, 25 bp, Probe sequence
gggtgtagttataaagagatgagcc

SEQ ID NO: 274835 - DNA, 25 bp, Probe sequence
tgcaactacactacttcttttacta

SEQ ID NO: 274836 - DNA, 25 bp, Probe sequence
tacactacttcttttactaatatta

SEQ ID NO: 274837 - DNA, 25 bp, Probe sequence
tttggatgataaactctttttggaa

SEQ ID NO: 274838 - DNA, 25 bp, Probe sequence
tttgcaactacactacttcttttac

SEQ ID NO: 274839 - DNA, 25 bp, Probe sequence
ttttcatttttgttacgtcactaag

SEQ ID NO: 274840 - DNA, 25 bp, Probe sequence
ttttcattagaatcaatatgcctat

SEQ ID NO: 274841 - DNA, 25 bp, Probe sequence
ttcatttttgttacgtcactaagtg

SEQ ID NO: 274842 - DNA, 25 bp, Probe sequence
ttgcaactacactacttcttttact

SEQ ID NO: 274843 - DNA, 25 bp, Probe sequence
attccttattgcattgataggtcta

SEQ ID NO: 274844 - DNA, 25 bp, Probe sequence
attagtaccatgttgcagtttggtt

SEQ ID NO: 274845 - DNA, 25 bp, Probe sequence
atagatggtggctatctgagtataa

SEQ ID NO: 274846 - DNA, 25 bp, Probe sequence
ataaggaggtggtgcctatggtggc

SEQ ID NO: 274847 - DNA, 25 bp, Probe sequence
atgttgcagtttggtttattcctta

SEQ ID NO: 274848 - DNA, 25 bp, Probe sequence
atggtggcattactgaaatctttag

SEQ ID NO: 274849 - DNA, 25 bp, Probe sequence
aggaggtggtgcctatggtggcatt

SEQ ID NO: 274850 - DNA, 25 bp, Probe sequence
aggagacgcctaatgattacaatta

SEQ ID NO: 274851 - DNA, 25 bp, Probe sequence
agtaccatgttgcagtttggtttat

SEQ ID NO: 274852 - DNA, 25 bp, Probe sequence
acaattagtaccatgttgcagtttg

SEQ ID NO: 274853 - DNA, 25 bp, Probe sequence
cagtttggtttattccttattgcat

SEQ ID NO: 274854 - DNA, 25 bp, Probe sequence
catgttgcagtttggtttattcctt

SEQ ID NO: 274855 - DNA, 25 bp, Probe sequence
cttattgcattgataggtctagtaa

SEQ ID NO: 274856 - DNA, 25 bp, Probe sequence
ctatggtggcattactgaaatcttt

SEQ ID NO: 274857 - DNA, 25 bp, Probe sequence
gcctatggtggcattactgaaatct

SEQ ID NO: 274858 - DNA, 25 bp, Probe sequence
gaaaggagacgcctaatgattacaa

SEQ ID NO: 274859 - DNA, 25 bp, Probe sequence
gaaatctttagaaaggagacgccta

SEQ ID NO: 274860 - DNA, 25 bp, Probe sequence
gaggtggtgcctatggtggcattac

SEQ ID NO: 274861 - DNA, 25 bp, Probe sequence
gatggtggctatctgagtataagga

SEQ ID NO: 274862 - DNA, 25 bp, Probe sequence
gataggtctagtaatcaagcttatt

SEQ ID NO: 274863 - DNA, 25 bp, Probe sequence
gattacaattagtaccatgttgcag

SEQ ID NO: 274864 - DNA, 25 bp, Probe sequence
gttgcagtttggtttattccttatt

SEQ ID NO: 274865 - DNA, 25 bp, Probe sequence
gtttggtttattccttattgcattg

SEQ ID NO: 274866 - DNA, 25 bp, Probe sequence
gtggtgcctatggtggcattactga

SEQ ID NO: 274867 - DNA, 25 bp, Probe sequence
ggtggcattactgaaatctttagaa

SEQ ID NO: 274868 - DNA, 25 bp, Probe sequence
ggtggctatctgagtataaggaggt

SEQ ID NO: 274869 - DNA, 25 bp, Probe sequence
ggtggtgcctatggtggcattactg

SEQ ID NO: 274870 - DNA, 25 bp, Probe sequence
ggtctagtaatcaagcttattgaat

SEQ ID NO: 274871 - DNA, 25 bp, Probe sequence
ggtgcctatggtggcattactgaaa

SEQ ID NO: 274872 - DNA, 25 bp, Probe sequence
ggtttattccttattgcattgatag

SEQ ID NO: 274873 - DNA, 25 bp, Probe sequence
ggcattactgaaatctttagaaagg

SEQ ID NO: 274874 - DNA, 25 bp, Probe sequence
ggctatctgagtataaggaggtggt

SEQ ID NO: 274875 - DNA, 25 bp, Probe sequence
tgcagtttggtttattccttattgc

SEQ ID NO: 274876 - DNA, 25 bp, Probe sequence
ttggtttattccttattgcattgat

SEQ ID NO: 274877 - DNA, 25 bp, Probe sequence
attctaaaactggttctcatatagt

SEQ ID NO: 274878 - DNA, 25 bp, Probe sequence
atagtaccatttgtaagtaaggaga

SEQ ID NO: 274879 - DNA, 25 bp, Probe sequence
ataggaaaagcttatgcaggtggaa

SEQ ID NO: 274880 - DNA, 25 bp, Probe sequence
atagacattctttaggtcataaatt

SEQ ID NO: 274881 - DNA, 25 bp, Probe sequence
atgactggcaaaatattagtggata

SEQ ID NO: 274882 - DNA, 25 bp, Probe sequence
atgagaggtttcctagctatacaat

SEQ ID NO: 274883 - DNA, 25 bp, Probe sequence
atgatgagaggtttcctagctatac

SEQ ID NO: 274884 - DNA, 25 bp, Probe sequence
agcttatgcaggtggaaaatatatt

SEQ ID NO: 274885 - DNA, 25 bp, Probe sequence
acaatactctctatagaagaattaa

SEQ ID NO: 274886 - DNA, 25 bp, Probe sequence
aaatatattaatactgcatatggta

SEQ ID NO: 274887 - DNA, 25 bp, Probe sequence
aaagaaatactcaatgactggcaaa

SEQ ID NO: 274888 - DNA, 25 bp, Probe sequence
aaaactggttctcatatagtaccat

SEQ ID NO: 274889 - DNA, 25 bp, Probe sequence
aaaatttatgcattgcagaatgatg

SEQ ID NO: 274890 - DNA, 25 bp, Probe sequence
aactataggaaaagcttatgcaggt

SEQ ID NO: 274891 - DNA, 25 bp, Probe sequence
aactggttctcatatagtaccattt

SEQ ID NO: 274892 - DNA, 25 bp, Probe sequence
aatactgcatatggtaaaatacatt

SEQ ID NO: 274893 - DNA, 25 bp, Probe sequence
ctggttctcatatagtaccatttgt

SEQ ID NO: 274894 - DNA, 25 bp, Probe sequence
gcatatggtaaaatacattattcta

SEQ ID NO: 274895 - DNA, 25 bp, Probe sequence
gcagaatgatgagaggtttcctagc

SEQ ID NO: 274896 - DNA, 25 bp, Probe sequence
gaatagacattctttaggtcataaa

SEQ ID NO: 274897 - DNA, 25 bp, Probe sequence
gaatgatgagaggtttcctagctat

SEQ ID NO: 274898 - DNA, 25 bp, Probe sequence
gaaatactcaatgactggcaaaata

SEQ ID NO: 274899 - DNA, 25 bp, Probe sequence
gacattctttaggtcataaattata

SEQ ID NO: 274900 - DNA, 25 bp, Probe sequence
gatgagaggtttcctagctatacaa

SEQ ID NO: 274901 - DNA, 25 bp, Probe sequence
gttctcatatagtaccatttgtaag

SEQ ID NO: 274902 - DNA, 25 bp, Probe sequence
gtggataaatttggatttaatcgta

SEQ ID NO: 274903 - DNA, 25 bp, Probe sequence
ggttctcatatagtaccatttgtaa

SEQ ID NO: 274904 - DNA, 25 bp, Probe sequence
ggaaaagcttatgcaggtggaaaat

SEQ ID NO: 274905 - DNA, 25 bp, Probe sequence
tgatgagaggtttcctagctataca

SEQ ID NO: 274906 - DNA, 25 bp, Probe sequence
tgagaggtttcctagctatacaata

SEQ ID NO: 274907 - DNA, 25 bp, Probe sequence
tctaaaactggttctcatatagtac

SEQ ID NO: 274908 - DNA, 25 bp, Probe sequence
tctcatatagtaccatttgtaagta

SEQ ID NO: 274909 - DNA, 25 bp, Probe sequence
tactcaatgactggcaaaatattag

SEQ ID NO: 274910 - DNA, 25 bp, Probe sequence
tatacaatactctctatagaagaat

SEQ ID NO: 274911 - DNA, 25 bp, Probe sequence
atttaaacaatttgatcctgacttt

SEQ ID NO: 274912 - DNA, 25 bp, Probe sequence
atttgatcctgacttttatatggct

SEQ ID NO: 274913 - DNA, 25 bp, Probe sequence
atatggctcaaagttggcaacgttt

SEQ ID NO: 274914 - DNA, 25 bp, Probe sequence
atcctgacttttatatggctcaaag

SEQ ID NO: 274915 - DNA, 25 bp, Probe sequence
atgctcaaatttattataattcagt

SEQ ID NO: 274916 - DNA, 25 bp, Probe sequence
atgaatacggtatcaaaaggaacag

SEQ ID NO: 274917 - DNA, 25 bp, Probe sequence
acaatttgatcctgacttttatatg

SEQ ID NO: 274918 - DNA, 25 bp, Probe sequence
aaacaatttgatcctgacttttata

SEQ ID NO: 274919 - DNA, 25 bp, Probe sequence
aaaagtgatgaatacggtatcaaaa

SEQ ID NO: 274920 - DNA, 25 bp, Probe sequence
aacaatttgatcctgacttttatat

SEQ ID NO: 274921 - DNA, 25 bp, Probe sequence
aagagtttatgaacatatatttgaa

SEQ ID NO: 274922 - DNA, 25 bp, Probe sequence
aatttgatcctgacttttatatggc

SEQ ID NO: 274923 - DNA, 25 bp, Probe sequence
caatttgatcctgacttttatatgg

SEQ ID NO: 274924 - DNA, 25 bp, Probe sequence
catgctcaaatttattataattcag

SEQ ID NO: 274925 - DNA, 25 bp, Probe sequence
cttttatatggctcaaagttggcaa

SEQ ID NO: 274926 - DNA, 25 bp, Probe sequence
ctgacttttatatggctcaaagttg

SEQ ID NO: 274927 - DNA, 25 bp, Probe sequence
cctgacttttatatggctcaaagtt

SEQ ID NO: 274928 - DNA, 25 bp, Probe sequence
gctcaaatttattataattcagtta

SEQ ID NO: 274929 - DNA, 25 bp, Probe sequence
gaaagtggatttaaacaatttgatc

SEQ ID NO: 274930 - DNA, 25 bp, Probe sequence
gacttttatatggctcaaagttggc

SEQ ID NO: 274931 - DNA, 25 bp, Probe sequence
gatcctgacttttatatggctcaaa

SEQ ID NO: 274932 - DNA, 25 bp, Probe sequence
gatagagatttctaaaattgctaaa

SEQ ID NO: 274933 - DNA, 25 bp, Probe sequence
gatttaaacaatttgatcctgactt

SEQ ID NO: 274934 - DNA, 25 bp, Probe sequence
tgatcctgacttttatatggctcaa

SEQ ID NO: 274935 - DNA, 25 bp, Probe sequence
tcctgacttttatatggctcaaagt

SEQ ID NO: 274936 - DNA, 25 bp, Probe sequence
taaacaatttgatcctgacttttat

SEQ ID NO: 274937 - DNA, 25 bp, Probe sequence
tatatggctcaaagttggcaacgtt

SEQ ID NO: 274938 - DNA, 25 bp, Probe sequence
ttttatatggctcaaagttggcaac

SEQ ID NO: 274939 - DNA, 25 bp, Probe sequence
tttgatcctgacttttatatggctc

SEQ ID NO: 274940 - DNA, 25 bp, Probe sequence
tttaaacaatttgatcctgactttt

SEQ ID NO: 274941 - DNA, 25 bp, Probe sequence
tttatatggctcaaagttggcaacg

SEQ ID NO: 274942 - DNA, 25 bp, Probe sequence
ttatatggctcaaagttggcaacgt

SEQ ID NO: 274943 - DNA, 25 bp, Probe sequence
ttaaacaatttgatcctgactttta

SEQ ID NO: 274944 - DNA, 25 bp, Probe sequence
ttgatcctgacttttatatggctca

SEQ ID NO: 274945 - DNA, 25 bp, Probe sequence
attcgaagacaggtgctcatatagt

SEQ ID NO: 274946 - DNA, 25 bp, Probe sequence
attattcgaagacaggtgctcatat

SEQ ID NO: 274947 - DNA, 25 bp, Probe sequence
atgttggcagttggcgagacaagtt

SEQ ID NO: 274948 - DNA, 25 bp, Probe sequence
agacaggtgctcatatagtacctta

SEQ ID NO: 274949 - DNA, 25 bp, Probe sequence
acatgttggcagttggcgagacaag

SEQ ID NO: 274950 - DNA, 25 bp, Probe sequence
acaggtgctcatatagtaccttata

SEQ ID NO: 274951 - DNA, 25 bp, Probe sequence
aaagtgcattattcgaagacaggtg

SEQ ID NO: 274952 - DNA, 25 bp, Probe sequence
aaaatggacatatgttaggtcatca

SEQ ID NO: 274953 - DNA, 25 bp, Probe sequence
aaaagtgcattattcgaagacaggt

SEQ ID NO: 274954 - DNA, 25 bp, Probe sequence
aaaatgtcaacaggcaatctaatat

SEQ ID NO: 274955 - DNA, 25 bp, Probe sequence
aagacaggtgctcatatagtacctt

SEQ ID NO: 274956 - DNA, 25 bp, Probe sequence
aatgtcaacaggcaatctaatatta

SEQ ID NO: 274957 - DNA, 25 bp, Probe sequence
caacaggcaatctaatattaagtga

SEQ ID NO: 274958 - DNA, 25 bp, Probe sequence
cacatgttggcagttggcgagacaa

SEQ ID NO: 274959 - DNA, 25 bp, Probe sequence
catgttggcagttggcgagacaagt

SEQ ID NO: 274960 - DNA, 25 bp, Probe sequence
caggtgctcatatagtaccttatat

SEQ ID NO: 274961 - DNA, 25 bp, Probe sequence
cattattcgaagacaggtgctcata

SEQ ID NO: 274962 - DNA, 25 bp, Probe sequence
ccacatgttggcagttggcgagaca

SEQ ID NO: 274963 - DNA, 25 bp, Probe sequence
gccacatgttggcagttggcgagac

SEQ ID NO: 274964 - DNA, 25 bp, Probe sequence
gctcatatagtaccttatattgata

SEQ ID NO: 274965 - DNA, 25 bp, Probe sequence
gcattattcgaagacaggtgctcat

SEQ ID NO: 274966 - DNA, 25 bp, Probe sequence
gaaggtaaatatcaggtagaagtaa

SEQ ID NO: 274967 - DNA, 25 bp, Probe sequence
gaagacaggtgctcatatagtacct

SEQ ID NO: 274968 - DNA, 25 bp, Probe sequence
gacaggtgctcatatagtaccttat

SEQ ID NO: 274969 - DNA, 25 bp, Probe sequence
gagaaaaaatgtcaacaggcaatct

SEQ ID NO: 274970 - DNA, 25 bp, Probe sequence
gtcaacaggcaatctaatattaagt

SEQ ID NO: 274971 - DNA, 25 bp, Probe sequence
gtgctcatatagtaccttatattga

SEQ ID NO: 274972 - DNA, 25 bp, Probe sequence
gtgcattattcgaagacaggtgctc

SEQ ID NO: 274973 - DNA, 25 bp, Probe sequence
ggtgctcatatagtaccttatattg

SEQ ID NO: 274974 - DNA, 25 bp, Probe sequence
ggcaatctaatattaagtgatgagc

SEQ ID NO: 274975 - DNA, 25 bp, Probe sequence
tcgaagacaggtgctcatatagtac

SEQ ID NO: 274976 - DNA, 25 bp, Probe sequence
tattcgaagacaggtgctcatatag

SEQ ID NO: 274977 - DNA, 25 bp, Probe sequence
ttattcgaagacaggtgctcatata

SEQ ID NO: 274978 - DNA, 25 bp, Probe sequence
ttcgaagacaggtgctcatatagta

SEQ ID NO: 274979 - DNA, 25 bp, Probe sequence
atatcgggtagagaacaatactgaa

SEQ ID NO: 274980 - DNA, 25 bp, Probe sequence
attaggtgaagttcattattctaaa

SEQ ID NO: 274981 - DNA, 25 bp, Probe sequence
ataccaggtgtaaatgcgtcaccta

SEQ ID NO: 274982 - DNA, 25 bp, Probe sequence
atcgggtagagaacaatactgaaat

SEQ ID NO: 274983 - DNA, 25 bp, Probe sequence
atgataccaggtgtaaatgcgtcac

SEQ ID NO: 274984 - DNA, 25 bp, Probe sequence
aggtaaatatcgggtagagaacaat

SEQ ID NO: 274985 - DNA, 25 bp, Probe sequence
aggtgtaaatgcgtcacctatgcat

SEQ ID NO: 274986 - DNA, 25 bp, Probe sequence
agtgccacatctcggcaattggcga

SEQ ID NO: 274987 - DNA, 25 bp, Probe sequence
accaggtgtaaatgcgtcacctatg

SEQ ID NO: 274988 - DNA, 25 bp, Probe sequence
acatctcggcaattggcgagacaag

SEQ ID NO: 274989 - DNA, 25 bp, Probe sequence
aaatatcgggtagagaacaatactg

SEQ ID NO: 274990 - DNA, 25 bp, Probe sequence
aatatcgggtagagaacaatactga

SEQ ID NO: 274991 - DNA, 25 bp, Probe sequence
cacatctcggcaattggcgagacaa

SEQ ID NO: 274992 - DNA, 25 bp, Probe sequence
caggtgtaaatgcgtcacctatgca

SEQ ID NO: 274993 - DNA, 25 bp, Probe sequence
cagtgccacatctcggcaattggcg

SEQ ID NO: 274994 - DNA, 25 bp, Probe sequence
ccaggtgtaaatgcgtcacctatgc

SEQ ID NO: 274995 - DNA, 25 bp, Probe sequence
ccacatctcggcaattggcgagaca

SEQ ID NO: 274996 - DNA, 25 bp, Probe sequence
gccacatctcggcaattggcgagac

SEQ ID NO: 274997 - DNA, 25 bp, Probe sequence
gaaggtaaatatcgggtagagaaca

SEQ ID NO: 274998 - DNA, 25 bp, Probe sequence
gaacaatactgaaatgaaattaggt

SEQ ID NO: 274999 - DNA, 25 bp, Probe sequence
gataccaggtgtaaatgcgtcacct

SEQ ID NO: 275000 - DNA, 25 bp, Probe sequence
gtaaatgcgtcacctatgcatcctt

SEQ ID NO: 275001 - DNA, 25 bp, Probe sequence
gtgccacatctcggcaattggcgag

SEQ ID NO: 275002 - DNA, 25 bp, Probe sequence
gtgaaggtaaatatcgggtagagaa

SEQ ID NO: 275003 - DNA, 25 bp, Probe sequence
gtgtaaatgcgtcacctatgcatcc

SEQ ID NO: 275004 - DNA, 25 bp, Probe sequence
ggtgtaaatgcgtcacctatgcatc

SEQ ID NO: 275005 - DNA, 25 bp, Probe sequence
ggtaaatatcgggtagagaacaata

SEQ ID NO: 275006 - DNA, 25 bp, Probe sequence
tgtaaatgcgtcacctatgcatcct

SEQ ID NO: 275007 - DNA, 25 bp, Probe sequence
tgaaggtaaatatcgggtagagaac

SEQ ID NO: 275008 - DNA, 25 bp, Probe sequence
tgataccaggtgtaaatgcgtcacc

SEQ ID NO: 275009 - DNA, 25 bp, Probe sequence
tgccacatctcggcaattggcgaga

SEQ ID NO: 275010 - DNA, 25 bp, Probe sequence
tcgggtagagaacaatactgaaatg

SEQ ID NO: 275011 - DNA, 25 bp, Probe sequence
tatcgggtagagaacaatactgaaa

SEQ ID NO: 275012 - DNA, 25 bp, Probe sequence
taccaggtgtaaatgcgtcacctat

SEQ ID NO: 275013 - DNA, 25 bp, Probe sequence
atattatcatttagtttgtatgagt

SEQ ID NO: 275014 - DNA, 25 bp, Probe sequence
atacgtcctttactaaaggtgagca

SEQ ID NO: 275015 - DNA, 25 bp, Probe sequence
ataatattgggaggattataccttt

SEQ ID NO: 275016 - DNA, 25 bp, Probe sequence
atcagtcacacggaggcatataaaa

SEQ ID NO: 275017 - DNA, 25 bp, Probe sequence
atcggtataattattggtttaatga

SEQ ID NO: 275018 - DNA, 25 bp, Probe sequence
atgcatttatcttaggattaatcat

SEQ ID NO: 275019 - DNA, 25 bp, Probe sequence
atgagtcgtttctacaacattttta

SEQ ID NO: 275020 - DNA, 25 bp, Probe sequence
atgtggcgatacttagttgcaatta

SEQ ID NO: 275021 - DNA, 25 bp, Probe sequence
agttatcatacgtcctttactaaag

SEQ ID NO: 275022 - DNA, 25 bp, Probe sequence
acaccatgcatttatcttaggatta

SEQ ID NO: 275023 - DNA, 25 bp, Probe sequence
acacaccatgcatttatcttaggat

SEQ ID NO: 275024 - DNA, 25 bp, Probe sequence
aaagaccagacactatgcatatttc

SEQ ID NO: 275025 - DNA, 25 bp, Probe sequence
aaagctaaaagaccagacactatgc

SEQ ID NO: 275026 - DNA, 25 bp, Probe sequence
aatcattggtgttactggttctgca

SEQ ID NO: 275027 - DNA, 25 bp, Probe sequence
aatatgtggcgatacttagttgcaa

SEQ ID NO: 275028 - DNA, 25 bp, Probe sequence
aattattgcctgtatgatttggtac

SEQ ID NO: 275029 - DNA, 25 bp, Probe sequence
gcgatacttagttgcaattattgcc

SEQ ID NO: 275030 - DNA, 25 bp, Probe sequence
gcatataaaatgagtcgtttctaca

SEQ ID NO: 275031 - DNA, 25 bp, Probe sequence
gcaattattgcctgtatgatttggt

SEQ ID NO: 275032 - DNA, 25 bp, Probe sequence
gaatagaattgacaccacaaatcgc

SEQ ID NO: 275033 - DNA, 25 bp, Probe sequence
gacactatgcatatttcaactggaa

SEQ ID NO: 275034 - DNA, 25 bp, Probe sequence
gaccagacactatgcatatttcaac

SEQ ID NO: 275035 - DNA, 25 bp, Probe sequence
gagtggaacggttttcatgattgat

SEQ ID NO: 275036 - DNA, 25 bp, Probe sequence
gatatcagtcacacggaggcatata

SEQ ID NO: 275037 - DNA, 25 bp, Probe sequence
gattaatcattggtgttactggttc

SEQ ID NO: 275038 - DNA, 25 bp, Probe sequence
gattgatatcagtcacacggaggca

SEQ ID NO: 275039 - DNA, 25 bp, Probe sequence
gttgtagttatcatacgtcctttac

SEQ ID NO: 275040 - DNA, 25 bp, Probe sequence
gtttgtatgagtggaacggttttca

SEQ ID NO: 275041 - DNA, 25 bp, Probe sequence
gtagttatcatacgtcctttactaa

SEQ ID NO: 275042 - DNA, 25 bp, Probe sequence
ggaacggttttcatgattgatatca

SEQ ID NO: 275043 - DNA, 25 bp, Probe sequence
tcgtttctacaacatttttaaacag

SEQ ID NO: 275044 - DNA, 25 bp, Probe sequence
taatgatttcatatgttgtagttat

SEQ ID NO: 275045 - DNA, 25 bp, Probe sequence
ttcaactggaaatatgtggcgatac

SEQ ID NO: 275046 - DNA, 25 bp, Probe sequence
ttggtgttactggttctgcaatcaa

SEQ ID NO: 275047 - DNA, 25 bp, Probe sequence
attctttgtggattgtttgacagta

SEQ ID NO: 275048 - DNA, 25 bp, Probe sequence
atatgcatcaacattctttgtggat

SEQ ID NO: 275049 - DNA, 25 bp, Probe sequence
atcaacattctttgtggattgtttg

SEQ ID NO: 275050 - DNA, 25 bp, Probe sequence
atgcatcaacattctttgtggattg

SEQ ID NO: 275051 - DNA, 25 bp, Probe sequence
acattctttgtggattgtttgacag

SEQ ID NO: 275052 - DNA, 25 bp, Probe sequence
aacattctttgtggattgtttgaca

SEQ ID NO: 275053 - DNA, 25 bp, Probe sequence
caacattctttgtggattgtttgac

SEQ ID NO: 275054 - DNA, 25 bp, Probe sequence
catcaacattctttgtggattgttt

SEQ ID NO: 275055 - DNA, 25 bp, Probe sequence
cattctttgtggattgtttgacagt

SEQ ID NO: 275056 - DNA, 25 bp, Probe sequence
ctttgtggattgtttgacagtagac

SEQ ID NO: 275057 - DNA, 25 bp, Probe sequence
gcatcaacattctttgtggattgtt

SEQ ID NO: 275058 - DNA, 25 bp, Probe sequence
gtttatatgcatcaacattctttgt

SEQ ID NO: 275059 - DNA, 25 bp, Probe sequence
gtggattgtttgacagtagacagtc

SEQ ID NO: 275060 - DNA, 25 bp, Probe sequence
tggattgtttgacagtagacagtca

SEQ ID NO: 275061 - DNA, 25 bp, Probe sequence
tgtggattgtttgacagtagacagt

SEQ ID NO: 275062 - DNA, 25 bp, Probe sequence
tgcatcaacattctttgtggattgt

SEQ ID NO: 275063 - DNA, 25 bp, Probe sequence
tctttgtggattgtttgacagtaga

SEQ ID NO: 275064 - DNA, 25 bp, Probe sequence
tcaacattctttgtggattgtttga

SEQ ID NO: 275065 - DNA, 25 bp, Probe sequence
tatgcatcaacattctttgtggatt

SEQ ID NO: 275066 - DNA, 25 bp, Probe sequence
tatatgcatcaacattctttgtgga

SEQ ID NO: 275067 - DNA, 25 bp, Probe sequence
tttgtggattgtttgacagtagaca

SEQ ID NO: 275068 - DNA, 25 bp, Probe sequence
tttatatgcatcaacattctttgtg

SEQ ID NO: 275069 - DNA, 25 bp, Probe sequence
ttatatgcatcaacattctttgtgg

SEQ ID NO: 275070 - DNA, 25 bp, Probe sequence
ttctttgtggattgtttgacagtag

SEQ ID NO: 275071 - DNA, 25 bp, Probe sequence
ttgtggattgtttgacagtagacag

SEQ ID NO: 275072 - DNA, 25 bp, Probe sequence
atacagccaaagttgacattttagg

SEQ ID NO: 275073 - DNA, 25 bp, Probe sequence
atcaatcaacgaataatctttttat

SEQ ID NO: 275074 - DNA, 25 bp, Probe sequence
agtgaattacgcgacgacacatcaa

SEQ ID NO: 275075 - DNA, 25 bp, Probe sequence
agagttaataaatcaagcgagctat

SEQ ID NO: 275076 - DNA, 25 bp, Probe sequence
agcgagctatattgttgctgatggg

SEQ ID NO: 275077 - DNA, 25 bp, Probe sequence
acctctagcgcatcgtatacctggt

SEQ ID NO: 275078 - DNA, 25 bp, Probe sequence
aaccttttttgcaaatcaatcaacg

SEQ ID NO: 275079 - DNA, 25 bp, Probe sequence
caaacatatcgtttgcacatcatca

SEQ ID NO: 275080 - DNA, 25 bp, Probe sequence
cagccaaccctgaaatagtgaatta

SEQ ID NO: 275081 - DNA, 25 bp, Probe sequence
catatttgtaggtatgggattccct

SEQ ID NO: 275082 - DNA, 25 bp, Probe sequence
ctttttatagtaacagccaaccctg

SEQ ID NO: 275083 - DNA, 25 bp, Probe sequence
cttgaagtatttgctggggctaaaa

SEQ ID NO: 275084 - DNA, 25 bp, Probe sequence
cttcgcatcgtttaaagcaacctct

SEQ ID NO: 275085 - DNA, 25 bp, Probe sequence
ctagcgcatcgtatacctggtattg

SEQ ID NO: 275086 - DNA, 25 bp, Probe sequence
cgcgacgacacatcaagcgtattta

SEQ ID NO: 275087 - DNA, 25 bp, Probe sequence
gcattgcaacaaagatatccaaaca

SEQ ID NO: 275088 - DNA, 25 bp, Probe sequence
gaagaaagatccaatacagccaaag

SEQ ID NO: 275089 - DNA, 25 bp, Probe sequence
gaagcggcacaatatgcattgcaac

SEQ ID NO: 275090 - DNA, 25 bp, Probe sequence
gaaaattgctcatgtaaatcatcaa

SEQ ID NO: 275091 - DNA, 25 bp, Probe sequence
gacacatcaagcgtatttagagtta

SEQ ID NO: 275092 - DNA, 25 bp, Probe sequence
gagttgatggatgaatgtttgaaaa

SEQ ID NO: 275093 - DNA, 25 bp, Probe sequence
gatgatgggcgtaggtggttctctt

SEQ ID NO: 275094 - DNA, 25 bp, Probe sequence
gttctcttgaagtatttgctggggc

SEQ ID NO: 275095 - DNA, 25 bp, Probe sequence
gttgctgatgggacaggagtagtca

SEQ ID NO: 275096 - DNA, 25 bp, Probe sequence
gtttaaacctgattacatatttgta

SEQ ID NO: 275097 - DNA, 25 bp, Probe sequence
gtatacctggtattgagttgatgga

SEQ ID NO: 275098 - DNA, 25 bp, Probe sequence
gtatttttgctaggggcaactaatg

SEQ ID NO: 275099 - DNA, 25 bp, Probe sequence
gtagtcaaagcttcgcatcgtttaa

SEQ ID NO: 275100 - DNA, 25 bp, Probe sequence
ggggctaaaaagagagcgccttata

SEQ ID NO: 275101 - DNA, 25 bp, Probe sequence
ggagtagtcaaagcttcgcatcgtt

SEQ ID NO: 275102 - DNA, 25 bp, Probe sequence
ggcgtaggtggttctcttgaagtat

SEQ ID NO: 275103 - DNA, 25 bp, Probe sequence
tagattggaaacgtattggtagatt

SEQ ID NO: 275104 - DNA, 25 bp, Probe sequence
tatgggattccctaaacaagaagaa

SEQ ID NO: 275105 - DNA, 25 bp, Probe sequence
ttaaagcaacctctagcgcatcgta

SEQ ID NO: 275106 - DNA, 25 bp, Probe sequence
atattacccgtgcacatgtgtcctt

SEQ ID NO: 275107 - DNA, 25 bp, Probe sequence
ataacgtatattacccgtgcacatg

SEQ ID NO: 275108 - DNA, 25 bp, Probe sequence
atcattcaattcgcgttaaaattat

SEQ ID NO: 275109 - DNA, 25 bp, Probe sequence
atgcattttcattcacagaaatgat

SEQ ID NO: 275110 - DNA, 25 bp, Probe sequence
atgtgtccttacatgcattttcatt

SEQ ID NO: 275111 - DNA, 25 bp, Probe sequence
acgtgatgattatatttttcatcgc

SEQ ID NO: 275112 - DNA, 25 bp, Probe sequence
aacgtatattacccgtgcacatgtg

SEQ ID NO: 275113 - DNA, 25 bp, Probe sequence
caccattcataacgtatattacccg

SEQ ID NO: 275114 - DNA, 25 bp, Probe sequence
cattgccactcatattgctctttga

SEQ ID NO: 275115 - DNA, 25 bp, Probe sequence
cttacatgcattttcattcacagaa

SEQ ID NO: 275116 - DNA, 25 bp, Probe sequence
ctcatattgctctttgagttcagta

SEQ ID NO: 275117 - DNA, 25 bp, Probe sequence
cgtatattacccgtgcacatgtgtc

SEQ ID NO: 275118 - DNA, 25 bp, Probe sequence
cccgtgcacatgtgtccttacatgc

SEQ ID NO: 275119 - DNA, 25 bp, Probe sequence
ccgtgcacatgtgtccttacatgca

SEQ ID NO: 275120 - DNA, 25 bp, Probe sequence
gccactcatattgctctttgagttc

SEQ ID NO: 275121 - DNA, 25 bp, Probe sequence
gcttttgcattttatgttggctttc

SEQ ID NO: 275122 - DNA, 25 bp, Probe sequence
gcacatgtgtccttacatgcatttt

SEQ ID NO: 275123 - DNA, 25 bp, Probe sequence
gacaccattcataacgtatattacc

SEQ ID NO: 275124 - DNA, 25 bp, Probe sequence
gtatattacccgtgcacatgtgtcc

SEQ ID NO: 275125 - DNA, 25 bp, Probe sequence
gtcgcttttgcattttatgttggct

SEQ ID NO: 275126 - DNA, 25 bp, Probe sequence
gtccttacatgcattttcattcaca

SEQ ID NO: 275127 - DNA, 25 bp, Probe sequence
gtgcacatgtgtccttacatgcatt

SEQ ID NO: 275128 - DNA, 25 bp, Probe sequence
gtgtccttacatgcattttcattca

SEQ ID NO: 275129 - DNA, 25 bp, Probe sequence
ggtggatgacaccattcataacgta

SEQ ID NO: 275130 - DNA, 25 bp, Probe sequence
ggatgacaccattcataacgtatat

SEQ ID NO: 275131 - DNA, 25 bp, Probe sequence
tggttcactttagcgaactacgcca

SEQ ID NO: 275132 - DNA, 25 bp, Probe sequence
tccttacatgcattttcattcacag

SEQ ID NO: 275133 - DNA, 25 bp, Probe sequence
tcaattcgcgttaaaattatcatta

SEQ ID NO: 275134 - DNA, 25 bp, Probe sequence
tacatgcattttcattcacagaaat

SEQ ID NO: 275135 - DNA, 25 bp, Probe sequence
tattacccgtgcacatgtgtcctta

SEQ ID NO: 275136 - DNA, 25 bp, Probe sequence
ttcataacgtatattacccgtgcac

SEQ ID NO: 275137 - DNA, 25 bp, Probe sequence
ttttgcattttatgttggctttcca

SEQ ID NO: 275138 - DNA, 25 bp, Probe sequence
ttgcattttatgttggctttccaat

SEQ ID NO: 275139 - DNA, 25 bp, Probe sequence
ttgccactcatattgctctttgagt

SEQ ID NO: 275140 - DNA, 25 bp, Probe sequence
atatgtaggagagcgttttacggaa

SEQ ID NO: 275141 - DNA, 25 bp, Probe sequence
ataaaaaggcatatcgcattccgaa

SEQ ID NO: 275142 - DNA, 25 bp, Probe sequence
atcgcttctttgatatgttgcaagc

SEQ ID NO: 275143 - DNA, 25 bp, Probe sequence
atcgcaatgatgatttaattcgtaa

SEQ ID NO: 275144 - DNA, 25 bp, Probe sequence
atgctgaatttcatgcgcaactaca

SEQ ID NO: 275145 - DNA, 25 bp, Probe sequence
agcagatgcgatagtgattggaatt

SEQ ID NO: 275146 - DNA, 25 bp, Probe sequence
acgtaccatacatttaactgaggat

SEQ ID NO: 275147 - DNA, 25 bp, Probe sequence
aacagtgtagtcagcattgtcatgc

SEQ ID NO: 275148 - DNA, 25 bp, Probe sequence
aaggcatatcgcattccgaattcaa

SEQ ID NO: 275149 - DNA, 25 bp, Probe sequence
aattcgtaaaatggttgttgcgcaa

SEQ ID NO: 275150 - DNA, 25 bp, Probe sequence
caggctgaagtattgcgtactgcga

SEQ ID NO: 275151 - DNA, 25 bp, Probe sequence
catgctcaaacgtatcgcaatgatg

SEQ ID NO: 275152 - DNA, 25 bp, Probe sequence
catccttttcagcgtatgacacgta

SEQ ID NO: 275153 - DNA, 25 bp, Probe sequence
gcgcaacaagatatgcttatacctt

SEQ ID NO: 275154 - DNA, 25 bp, Probe sequence
gcgagtttacatccttatggcagtt

SEQ ID NO: 275155 - DNA, 25 bp, Probe sequence
gcattgtcatgctcaaacgtatcgc

SEQ ID NO: 275156 - DNA, 25 bp, Probe sequence
gaagatgctgaatttcatgcgcaac

SEQ ID NO: 275157 - DNA, 25 bp, Probe sequence
gacaaagcaggctgaagtattgcgt

SEQ ID NO: 275158 - DNA, 25 bp, Probe sequence
gagtattgggcatttgagagtcgtt

SEQ ID NO: 275159 - DNA, 25 bp, Probe sequence
gttgcaagcgagtttacatccttat

SEQ ID NO: 275160 - DNA, 25 bp, Probe sequence
gttataatgcttttctagagcaaca

SEQ ID NO: 275161 - DNA, 25 bp, Probe sequence
gtgcaggcatgtctgcatctgacgg

SEQ ID NO: 275162 - DNA, 25 bp, Probe sequence
gggcatttgagagtcgttttattac

SEQ ID NO: 275163 - DNA, 25 bp, Probe sequence
ggcagttggcaagagtattgggcat

SEQ ID NO: 275164 - DNA, 25 bp, Probe sequence
tgcttataccttgggagatgattcc

SEQ ID NO: 275165 - DNA, 25 bp, Probe sequence
tgattggaattggtgcaggcatgtc

SEQ ID NO: 275166 - DNA, 25 bp, Probe sequence
tgaggatatctcaacattgattaca

SEQ ID NO: 275167 - DNA, 25 bp, Probe sequence
tcaattcaagaacgtaccatacatt

SEQ ID NO: 275168 - DNA, 25 bp, Probe sequence
tacatccttatggcagttggcaaga

SEQ ID NO: 275169 - DNA, 25 bp, Probe sequence
tagatcaacctgtaggtcagtctta

SEQ ID NO: 275170 - DNA, 25 bp, Probe sequence
tatcgcattccgaattcaattcaag

SEQ ID NO: 275171 - DNA, 25 bp, Probe sequence
tattgcgtactgcgattgatgaagc

SEQ ID NO: 275172 - DNA, 25 bp, Probe sequence
tttgagagtcgttttattacattaa

SEQ ID NO: 275173 - DNA, 25 bp, Probe sequence
ttattgaaaaatatcgcttctttga

SEQ ID NO: 275174 - DNA, 25 bp, Probe sequence
atttgaccaaagaccaacattttgt

SEQ ID NO: 275175 - DNA, 25 bp, Probe sequence
atgccatacacagttaataaattga

SEQ ID NO: 275176 - DNA, 25 bp, Probe sequence
agtatatatgaattaggtgtgcttt

SEQ ID NO: 275177 - DNA, 25 bp, Probe sequence
agatgttgcttttaagggagaacga

SEQ ID NO: 275178 - DNA, 25 bp, Probe sequence
acccacgttagatgaagtactttca

SEQ ID NO: 275179 - DNA, 25 bp, Probe sequence
acaggttatgccatacacagttaat

SEQ ID NO: 275180 - DNA, 25 bp, Probe sequence
acacattatcgcaattaaaatcatt

SEQ ID NO: 275181 - DNA, 25 bp, Probe sequence
aacaattgatagaacatcggatggt

SEQ ID NO: 275182 - DNA, 25 bp, Probe sequence
aacatcggatggtaaggggcgtatt

SEQ ID NO: 275183 - DNA, 25 bp, Probe sequence
aagccaaacttttcaagaattgctc

SEQ ID NO: 275184 - DNA, 25 bp, Probe sequence
aagcacatcatcatcaattacaggt

SEQ ID NO: 275185 - DNA, 25 bp, Probe sequence
aatgtaaattgctggcatttttgga

SEQ ID NO: 275186 - DNA, 25 bp, Probe sequence
aattgctagttatgttaatcctaat

SEQ ID NO: 275187 - DNA, 25 bp, Probe sequence
aattgctggcatttttggaagaaaa

SEQ ID NO: 275188 - DNA, 25 bp, Probe sequence
caatcttttgatatcgaatgcatcg

SEQ ID NO: 275189 - DNA, 25 bp, Probe sequence
ctgattacacattatcgcaattaaa

SEQ ID NO: 275190 - DNA, 25 bp, Probe sequence
cgaatgcatcgaaaagttaaacaca

SEQ ID NO: 275191 - DNA, 25 bp, Probe sequence
ccgagtgattttcctgaaaatacaa

SEQ ID NO: 275192 - DNA, 25 bp, Probe sequence
gctattgattgaattgaaaagtccg

SEQ ID NO: 275193 - DNA, 25 bp, Probe sequence
gggagaacgaatacccacgttagat

SEQ ID NO: 275194 - DNA, 25 bp, Probe sequence
gaatacccacgttagatgaagtact

SEQ ID NO: 275195 - DNA, 25 bp, Probe sequence
gaattgctcaaattgctagttatgt

SEQ ID NO: 275196 - DNA, 25 bp, Probe sequence
gaaaatacaatggtcggttatcgag

SEQ ID NO: 275197 - DNA, 25 bp, Probe sequence
gatgttcatttgaccaaagaccaac

SEQ ID NO: 275198 - DNA, 25 bp, Probe sequence
gttatgttaatcctaattatgcatt

SEQ ID NO: 275199 - DNA, 25 bp, Probe sequence
gtagttatacaatcttttgatatcg

SEQ ID NO: 275200 - DNA, 25 bp, Probe sequence
gtcgatgcgacacaagtagttatac

SEQ ID NO: 275201 - DNA, 25 bp, Probe sequence
ggaagaaaagaaagtcgatgcgaca

SEQ ID NO: 275202 - DNA, 25 bp, Probe sequence
ggctcaatgttgctatgttagaaat

SEQ ID NO: 275203 - DNA, 25 bp, Probe sequence
tggggctcaatgttgctatgttaga

SEQ ID NO: 275204 - DNA, 25 bp, Probe sequence
tgaagtactttcattatgcttaaag

SEQ ID NO: 275205 - DNA, 25 bp, Probe sequence
tcaattacaggttatgccatacaca

SEQ ID NO: 275206 - DNA, 25 bp, Probe sequence
tacaatggtcggttatcgagaggta

SEQ ID NO: 275207 - DNA, 25 bp, Probe sequence
ttgaaaagtccgaatttatatccag

SEQ ID NO: 275208 - DNA, 25 bp, Probe sequence
attcgagcgcatgggcgatgtgttg

SEQ ID NO: 275209 - DNA, 25 bp, Probe sequence
attgactcatttttaatccaaaaag

SEQ ID NO: 275210 - DNA, 25 bp, Probe sequence
attgatccaaacggcagactatcta

SEQ ID NO: 275211 - DNA, 25 bp, Probe sequence
atatcagtcactattaaccaaattt

SEQ ID NO: 275212 - DNA, 25 bp, Probe sequence
atcaattgactcatttttaatccaa

SEQ ID NO: 275213 - DNA, 25 bp, Probe sequence
atcagtcactattaaccaaatttaa

SEQ ID NO: 275214 - DNA, 25 bp, Probe sequence
atccaaacggcagactatctactgt

SEQ ID NO: 275215 - DNA, 25 bp, Probe sequence
atgcatcaattgactcatttttaat

SEQ ID NO: 275216 - DNA, 25 bp, Probe sequence
aggtatatcagtcactattaaccaa

SEQ ID NO: 275217 - DNA, 25 bp, Probe sequence
agatgcatcaattgactcattttta

SEQ ID NO: 275218 - DNA, 25 bp, Probe sequence
agcgcatgggcgatgtgttgaatag

SEQ ID NO: 275219 - DNA, 25 bp, Probe sequence
aaacggcagactatctactgttggt

SEQ ID NO: 275220 - DNA, 25 bp, Probe sequence
aacggcagactatctactgttggtg

SEQ ID NO: 275221 - DNA, 25 bp, Probe sequence
aattcgagcgcatgggcgatgtgtt

SEQ ID NO: 275222 - DNA, 25 bp, Probe sequence
aattgatccaaacggcagactatct

SEQ ID NO: 275223 - DNA, 25 bp, Probe sequence
caattgactcatttttaatccaaaa

SEQ ID NO: 275224 - DNA, 25 bp, Probe sequence
caaacggcagactatctactgttgg

SEQ ID NO: 275225 - DNA, 25 bp, Probe sequence
cgagcgcatgggcgatgtgttgaat

SEQ ID NO: 275226 - DNA, 25 bp, Probe sequence
gcgcatgggcgatgtgttgaatagt

SEQ ID NO: 275227 - DNA, 25 bp, Probe sequence
gcatcaattgactcatttttaatcc

SEQ ID NO: 275228 - DNA, 25 bp, Probe sequence
gaaaactacaatggttctaacgttg

SEQ ID NO: 275229 - DNA, 25 bp, Probe sequence
gactcatttttaatccaaaaagaag

SEQ ID NO: 275230 - DNA, 25 bp, Probe sequence
gagcgcatgggcgatgtgttgaata

SEQ ID NO: 275231 - DNA, 25 bp, Probe sequence
gatccaaacggcagactatctactg

SEQ ID NO: 275232 - DNA, 25 bp, Probe sequence
gatgcatcaattgactcatttttaa

SEQ ID NO: 275233 - DNA, 25 bp, Probe sequence
gttgaaaactacaatggttctaacg

SEQ ID NO: 275234 - DNA, 25 bp, Probe sequence
gtatatcagtcactattaaccaaat

SEQ ID NO: 275235 - DNA, 25 bp, Probe sequence
ggtatatcagtcactattaaccaaa

SEQ ID NO: 275236 - DNA, 25 bp, Probe sequence
tccaaacggcagactatctactgtt

SEQ ID NO: 275237 - DNA, 25 bp, Probe sequence
tcgagcgcatgggcgatgtgttgaa

SEQ ID NO: 275238 - DNA, 25 bp, Probe sequence
taaggttgaaaactacaatggttct

SEQ ID NO: 275239 - DNA, 25 bp, Probe sequence
tatcagtcactattaaccaaattta

SEQ ID NO: 275240 - DNA, 25 bp, Probe sequence
ttcgagcgcatgggcgatgtgttga

SEQ ID NO: 275241 - DNA, 25 bp, Probe sequence
ttgatccaaacggcagactatctac

SEQ ID NO: 275242 - DNA, 25 bp, Probe sequence
attgtgcgacaaggattgcgatttt

SEQ ID NO: 275243 - DNA, 25 bp, Probe sequence
attagatttagtgatgcctggcatg

SEQ ID NO: 275244 - DNA, 25 bp, Probe sequence
attatccacgattgaaaacatagaa

SEQ ID NO: 275245 - DNA, 25 bp, Probe sequence
atcctaaggcacaagatgtattcga

SEQ ID NO: 275246 - DNA, 25 bp, Probe sequence
agagagaaattgaagtgttacgtga

SEQ ID NO: 275247 - DNA, 25 bp, Probe sequence
accacactacacgaataagttgtca

SEQ ID NO: 275248 - DNA, 25 bp, Probe sequence
actattagacgagttatgaacggtg

SEQ ID NO: 275249 - DNA, 25 bp, Probe sequence
acacaagcagcaatttatgcaatgg

SEQ ID NO: 275250 - DNA, 25 bp, Probe sequence
aaagtaatattagtagatgaccatt

SEQ ID NO: 275251 - DNA, 25 bp, Probe sequence
aacaattaaaacacatgtcagtcat

SEQ ID NO: 275252 - DNA, 25 bp, Probe sequence
aacacatgtcagtcatatatttagt

SEQ ID NO: 275253 - DNA, 25 bp, Probe sequence
aagactttgcagatggagaaacatt

SEQ ID NO: 275254 - DNA, 25 bp, Probe sequence
aaggtgctgatggttatgaaatgaa

SEQ ID NO: 275255 - DNA, 25 bp, Probe sequence
aatgatacatcctaaggcacaagat

SEQ ID NO: 275256 - DNA, 25 bp, Probe sequence
cctgatattgtgctattagatttag

SEQ ID NO: 275257 - DNA, 25 bp, Probe sequence
gccaaaaaccacactacacgaataa

SEQ ID NO: 275258 - DNA, 25 bp, Probe sequence
gcgatttttattatccacgattgaa

SEQ ID NO: 275259 - DNA, 25 bp, Probe sequence
gcgatcgtacacaagcagcaattta

SEQ ID NO: 275260 - DNA, 25 bp, Probe sequence
gcagaaactttatttgtatctgaaa

SEQ ID NO: 275261 - DNA, 25 bp, Probe sequence
gaatatattaaggcacattatccgg

SEQ ID NO: 275262 - DNA, 25 bp, Probe sequence
gaagtgttacgtgaaatggttaaag

SEQ ID NO: 275263 - DNA, 25 bp, Probe sequence
gaagttttacaagactttgcagatg

SEQ ID NO: 275264 - DNA, 25 bp, Probe sequence
gaacggtgaaaaaatgatacatcct

SEQ ID NO: 275265 - DNA, 25 bp, Probe sequence
gaacatgtaatttcagcaatcaata

SEQ ID NO: 275266 - DNA, 25 bp, Probe sequence
gaaatgaaagacgttgagcctcagc

SEQ ID NO: 275267 - DNA, 25 bp, Probe sequence
gaaagacgttgagcctcagcaatta

SEQ ID NO: 275268 - DNA, 25 bp, Probe sequence
gatgtattcgaaacagttagccaaa

SEQ ID NO: 275269 - DNA, 25 bp, Probe sequence
gatgaccattatattgtgcgacaag

SEQ ID NO: 275270 - DNA, 25 bp, Probe sequence
gatgcctggcatgaatggtattgaa

SEQ ID NO: 275271 - DNA, 25 bp, Probe sequence
gattgcgatttttattatccacgat

SEQ ID NO: 275272 - DNA, 25 bp, Probe sequence
gttgagcctcagcaattaattgaaa

SEQ ID NO: 275273 - DNA, 25 bp, Probe sequence
gttagccaaaaaccacactacacga

SEQ ID NO: 275274 - DNA, 25 bp, Probe sequence
gttagcgatcgtacacaagcagcaa

SEQ ID NO: 275275 - DNA, 25 bp, Probe sequence
gtaaattacaagttagcgatcgtac

SEQ ID NO: 275276 - DNA, 25 bp, Probe sequence
attaaagcgcaacgtattatgaaag

SEQ ID NO: 275277 - DNA, 25 bp, Probe sequence
attacaacgatggatcatgctgata

SEQ ID NO: 275278 - DNA, 25 bp, Probe sequence
atttgagtagtaagcacatcgtgaa

SEQ ID NO: 275279 - DNA, 25 bp, Probe sequence
atagctgacaaatatggtgtgagtg

SEQ ID NO: 275280 - DNA, 25 bp, Probe sequence
atcacgttgatagtttacaagatgg

SEQ ID NO: 275281 - DNA, 25 bp, Probe sequence
atctgttgaacagtcattaatcaat

SEQ ID NO: 275282 - DNA, 25 bp, Probe sequence
atgaatggaagatgactgcgaaaga

SEQ ID NO: 275283 - DNA, 25 bp, Probe sequence
agcacatcgtgaaatctgttgaaca

SEQ ID NO: 275284 - DNA, 25 bp, Probe sequence
aagttgaagtcattcggggtgtcga

SEQ ID NO: 275285 - DNA, 25 bp, Probe sequence
aatggacatcgttatgatttgagta

SEQ ID NO: 275286 - DNA, 25 bp, Probe sequence
aatttagatgatcagtcgtggtttg

SEQ ID NO: 275287 - DNA, 25 bp, Probe sequence
caagtcagttaaagcgtattgatca

SEQ ID NO: 275288 - DNA, 25 bp, Probe sequence
ctttggatttatcacccgaattaag

SEQ ID NO: 275289 - DNA, 25 bp, Probe sequence
gccttctaagcaatttgattttaca

SEQ ID NO: 275290 - DNA, 25 bp, Probe sequence
gaaagactacatattagcatcaatc

SEQ ID NO: 275291 - DNA, 25 bp, Probe sequence
gattaatcactatgttcatttttct

SEQ ID NO: 275292 - DNA, 25 bp, Probe sequence
gattcaatgtatcaaaaccatgttc

SEQ ID NO: 275293 - DNA, 25 bp, Probe sequence
gttgctgatgcattaactaaacttg

SEQ ID NO: 275294 - DNA, 25 bp, Probe sequence
gttcatttttctaggcttgtacaag

SEQ ID NO: 275295 - DNA, 25 bp, Probe sequence
gtttgacatttacaccgctattatc

SEQ ID NO: 275296 - DNA, 25 bp, Probe sequence
gtattgatcaagcaatcgaagggct

SEQ ID NO: 275297 - DNA, 25 bp, Probe sequence
gtaatgctttggatttatcacccga

SEQ ID NO: 275298 - DNA, 25 bp, Probe sequence
gtcgtggtttgacatttacaccgct

SEQ ID NO: 275299 - DNA, 25 bp, Probe sequence
gtgaatcactgtttggtaatgcttt

SEQ ID NO: 275300 - DNA, 25 bp, Probe sequence
ggggtgtcgaattttaatcattcac

SEQ ID NO: 275301 - DNA, 25 bp, Probe sequence
ggtgtgagtgacacagctgtgatga

SEQ ID NO: 275302 - DNA, 25 bp, Probe sequence
ggtttttggcgtgcaaatgaatgga

SEQ ID NO: 275303 - DNA, 25 bp, Probe sequence
ggatccagaacaagttgctgatgca

SEQ ID NO: 275304 - DNA, 25 bp, Probe sequence
ggcttgtacaaggtttttggcgtgc

SEQ ID NO: 275305 - DNA, 25 bp, Probe sequence
tgtggtatcattttgccttctaagc

SEQ ID NO: 275306 - DNA, 25 bp, Probe sequence
tacaccgctattatcggacaagata

SEQ ID NO: 275307 - DNA, 25 bp, Probe sequence
tagaattatcgccatatcacgttga

SEQ ID NO: 275308 - DNA, 25 bp, Probe sequence
tttagatagtctactcattcatcgt

SEQ ID NO: 275309 - DNA, 25 bp, Probe sequence
ttttaatcattcacaataccaattg

SEQ ID NO: 275310 - DNA, 25 bp, Probe sequence
atgggctatttgtcgtgcgatgaat

SEQ ID NO: 275311 - DNA, 25 bp, Probe sequence
atggatggcaatgtttcgatttagt

SEQ ID NO: 275312 - DNA, 25 bp, Probe sequence
agaggatgggatttcgacggtagtt

SEQ ID NO: 275313 - DNA, 25 bp, Probe sequence
acatcggacacaagtttaaagttag

SEQ ID NO: 275314 - DNA, 25 bp, Probe sequence
acagctattgtcttaaatggtgatt

SEQ ID NO: 275315 - DNA, 25 bp, Probe sequence
aaagtaaagtacgctattcaattag

SEQ ID NO: 275316 - DNA, 25 bp, Probe sequence
aaagctgaacctggggacttagtgg

SEQ ID NO: 275317 - DNA, 25 bp, Probe sequence
aaaagtgccaatgacaccattagta

SEQ ID NO: 275318 - DNA, 25 bp, Probe sequence
aaaattgcaaacttggaagctcaaa

SEQ ID NO: 275319 - DNA, 25 bp, Probe sequence
aactggaataatggtggatggcgta

SEQ ID NO: 275320 - DNA, 25 bp, Probe sequence
aataggtatgtttttggcattgggt

SEQ ID NO: 275321 - DNA, 25 bp, Probe sequence
aatttatcacaacacaccaactttc

SEQ ID NO: 275322 - DNA, 25 bp, Probe sequence
cacaacacaccaactttcaaagctg

SEQ ID NO: 275323 - DNA, 25 bp, Probe sequence
gaagctccaaaaacacaaatctata

SEQ ID NO: 275324 - DNA, 25 bp, Probe sequence
gacacacttagtgctatagcattaa

SEQ ID NO: 275325 - DNA, 25 bp, Probe sequence
gacaccattagtagaaccaaaacca

SEQ ID NO: 275326 - DNA, 25 bp, Probe sequence
gaggttgcacataaagttgttcata

SEQ ID NO: 275327 - DNA, 25 bp, Probe sequence
gatttcaaatactccgaaaaactca

SEQ ID NO: 275328 - DNA, 25 bp, Probe sequence
gatatggtcatacagctattgtctt

SEQ ID NO: 275329 - DNA, 25 bp, Probe sequence
gatttcgacggtagttatggatggc

SEQ ID NO: 275330 - DNA, 25 bp, Probe sequence
gatttggtggaggatatggtcatac

SEQ ID NO: 275331 - DNA, 25 bp, Probe sequence
gttactacagttttagagaagctcc

SEQ ID NO: 275332 - DNA, 25 bp, Probe sequence
gttagacaacaaatcagcaatttca

SEQ ID NO: 275333 - DNA, 25 bp, Probe sequence
gtattcgcgaaatcagagttaaatg

SEQ ID NO: 275334 - DNA, 25 bp, Probe sequence
gtcgtgcgatgaatttaagtacact

SEQ ID NO: 275335 - DNA, 25 bp, Probe sequence
gtggtttttagtggaagatttggtg

SEQ ID NO: 275336 - DNA, 25 bp, Probe sequence
gggtatgagcaaaatgtattcgcga

SEQ ID NO: 275337 - DNA, 25 bp, Probe sequence
ggatggcgtaaagcagaggttgcac

SEQ ID NO: 275338 - DNA, 25 bp, Probe sequence
ggaagctcaaaattctaatcagaag

SEQ ID NO: 275339 - DNA, 25 bp, Probe sequence
ggaattttgtcaatttcaataggta

SEQ ID NO: 275340 - DNA, 25 bp, Probe sequence
ggcattgggtatgtcgaacaaagca

SEQ ID NO: 275341 - DNA, 25 bp, Probe sequence
tggaatcatctttatggtcatggat

SEQ ID NO: 275342 - DNA, 25 bp, Probe sequence
taataattactttggttactacagt

SEQ ID NO: 275343 - DNA, 25 bp, Probe sequence
ttttacctccttcaatagctttcta

SEQ ID NO: 275344 - DNA, 25 bp, Probe sequence
catattttggaaagacaagttaatt

SEQ ID NO: 275345 - DNA, 25 bp, Probe sequence
cttttcatattttggaaagacaagt

SEQ ID NO: 275346 - DNA, 25 bp, Probe sequence
ctacaatagctttacaaaacaaaga

SEQ ID NO: 275347 - DNA, 25 bp, Probe sequence
ctcctacaatagctttacaaaacaa

SEQ ID NO: 275348 - DNA, 25 bp, Probe sequence
cctcctacaatagctttacaaaaca

SEQ ID NO: 275349 - DNA, 25 bp, Probe sequence
cctacaatagctttacaaaacaaag

SEQ ID NO: 275350 - DNA, 25 bp, Probe sequence
tcctacaatagctttacaaaacaaa

SEQ ID NO: 275351 - DNA, 25 bp, Probe sequence
tcatattttggaaagacaagttaat

SEQ ID NO: 275352 - DNA, 25 bp, Probe sequence
tacaatagctttacaaaacaaagaa

SEQ ID NO: 275353 - DNA, 25 bp, Probe sequence
tacctcctacaatagctttacaaaa

SEQ ID NO: 275354 - DNA, 25 bp, Probe sequence
tattttggaaagacaagttaattat

SEQ ID NO: 275355 - DNA, 25 bp, Probe sequence
tttacctcctacaatagctttacaa

SEQ ID NO: 275356 - DNA, 25 bp, Probe sequence
ttttcatattttggaaagacaagtt

SEQ ID NO: 275357 - DNA, 25 bp, Probe sequence
ttttacctcctacaatagctttaca

SEQ ID NO: 275358 - DNA, 25 bp, Probe sequence
ttacctcctacaatagctttacaaa

SEQ ID NO: 275359 - DNA, 25 bp, Probe sequence
ttcatattttggaaagacaagttaa

SEQ ID NO: 275360 - DNA, 25 bp, Probe sequence
attccgttcttctttatcaacttca

SEQ ID NO: 275361 - DNA, 25 bp, Probe sequence
atatgatttaaactcacccggacaa

SEQ ID NO: 275362 - DNA, 25 bp, Probe sequence
atggaaaaaccttatatgttaacat

SEQ ID NO: 275363 - DNA, 25 bp, Probe sequence
acatatgatttaaactcacccggac

SEQ ID NO: 275364 - DNA, 25 bp, Probe sequence
aactcacccggacaaaaatatgagg

SEQ ID NO: 275365 - DNA, 25 bp, Probe sequence
aaaggaaatttctaatggtcattgc

SEQ ID NO: 275366 - DNA, 25 bp, Probe sequence
aacatatgatttaaactcacccgga

SEQ ID NO: 275367 - DNA, 25 bp, Probe sequence
aaggaaatttctaatggtcattgca

SEQ ID NO: 275368 - DNA, 25 bp, Probe sequence
aatttctaatggtcattgcaattat

SEQ ID NO: 275369 - DNA, 25 bp, Probe sequence
cacccggacaaaaatatgaggaatt

SEQ ID NO: 275370 - DNA, 25 bp, Probe sequence
catatgatttaaactcacccggaca

SEQ ID NO: 275371 - DNA, 25 bp, Probe sequence
cttctttatcaacttcagaaatgat

SEQ ID NO: 275372 - DNA, 25 bp, Probe sequence
cgttcttctttatcaacttcagaaa

SEQ ID NO: 275373 - DNA, 25 bp, Probe sequence
ccgttcttctttatcaacttcagaa

SEQ ID NO: 275374 - DNA, 25 bp, Probe sequence
gaaatcttcatttttattccgttct

SEQ ID NO: 275375 - DNA, 25 bp, Probe sequence
gaaatttctaatggtcattgcaatt

SEQ ID NO: 275376 - DNA, 25 bp, Probe sequence
gttcttctttatcaacttcagaaat

SEQ ID NO: 275377 - DNA, 25 bp, Probe sequence
gttaacatatgatttaaactcaccc

SEQ ID NO: 275378 - DNA, 25 bp, Probe sequence
ggtcattgcaattattggaaatctt

SEQ ID NO: 275379 - DNA, 25 bp, Probe sequence
ggaaaaaccttatatgttaacatat

SEQ ID NO: 275380 - DNA, 25 bp, Probe sequence
ggaaatttctaatggtcattgcaat

SEQ ID NO: 275381 - DNA, 25 bp, Probe sequence
tccgttcttctttatcaacttcaga

SEQ ID NO: 275382 - DNA, 25 bp, Probe sequence
tctaatggtcattgcaattattgga

SEQ ID NO: 275383 - DNA, 25 bp, Probe sequence
tcatttttattccgttcttctttat

SEQ ID NO: 275384 - DNA, 25 bp, Probe sequence
taatggtcattgcaattattggaaa

SEQ ID NO: 275385 - DNA, 25 bp, Probe sequence
taacatatgatttaaactcacccgg

SEQ ID NO: 275386 - DNA, 25 bp, Probe sequence
taaactcacccggacaaaaatatga

SEQ ID NO: 275387 - DNA, 25 bp, Probe sequence
tatgatttaaactcacccggacaaa

SEQ ID NO: 275388 - DNA, 25 bp, Probe sequence
tattccgttcttctttatcaacttc

SEQ ID NO: 275389 - DNA, 25 bp, Probe sequence
ttaaactcacccggacaaaaatatg

SEQ ID NO: 275390 - DNA, 25 bp, Probe sequence
tttattccgttcttctttatcaact

SEQ ID NO: 275391 - DNA, 25 bp, Probe sequence
ttattccgttcttctttatcaactt

SEQ ID NO: 275392 - DNA, 25 bp, Probe sequence
ttcttctttatcaacttcagaaatg

SEQ ID NO: 275393 - DNA, 25 bp, Probe sequence
ttccgttcttctttatcaacttcag

SEQ ID NO: 275394 - DNA, 25 bp, Probe sequence
attgcattaaacttatctgaaacac

SEQ ID NO: 275395 - DNA, 25 bp, Probe sequence
atagatatttcgtattcattcggta

SEQ ID NO: 275396 - DNA, 25 bp, Probe sequence
agtcttccacaaacacgcttaagaa

SEQ ID NO: 275397 - DNA, 25 bp, Probe sequence
agtcagtcgtactcgacattaccat

SEQ ID NO: 275398 - DNA, 25 bp, Probe sequence
agtcatttatgacattgctcaagac

SEQ ID NO: 275399 - DNA, 25 bp, Probe sequence
actatcatcaatttttaaaccccat

SEQ ID NO: 275400 - DNA, 25 bp, Probe sequence
acaagcacaatctaaaattgcatta

SEQ ID NO: 275401 - DNA, 25 bp, Probe sequence
aaatgaccgctttagaattagctaa

SEQ ID NO: 275402 - DNA, 25 bp, Probe sequence
aaaccagagacatatccattgataa

SEQ ID NO: 275403 - DNA, 25 bp, Probe sequence
aacatggacattggcatgcagtcat

SEQ ID NO: 275404 - DNA, 25 bp, Probe sequence
aagcgaaatcaacgcaattataaaa

SEQ ID NO: 275405 - DNA, 25 bp, Probe sequence
aaggtgttaaaatttatgcgcatta

SEQ ID NO: 275406 - DNA, 25 bp, Probe sequence
aattactgcaattcaacaaaataaa

SEQ ID NO: 275407 - DNA, 25 bp, Probe sequence
cacacaacatatgacactcccaatg

SEQ ID NO: 275408 - DNA, 25 bp, Probe sequence
catcaatttttaaaccccatcgatt

SEQ ID NO: 275409 - DNA, 25 bp, Probe sequence
cgttatatttattggccttttgtgt

SEQ ID NO: 275410 - DNA, 25 bp, Probe sequence
gccttatttttagtgcttaatgaaa

SEQ ID NO: 275411 - DNA, 25 bp, Probe sequence
gcttaatgaaagtcagtcgtactcg

SEQ ID NO: 275412 - DNA, 25 bp, Probe sequence
gacatatccattgataactatcatc

SEQ ID NO: 275413 - DNA, 25 bp, Probe sequence
gtatccaaacgcacaattttaagag

SEQ ID NO: 275414 - DNA, 25 bp, Probe sequence
gtttaagtcttccacaaacacgctt

SEQ ID NO: 275415 - DNA, 25 bp, Probe sequence
gtattcattcggtaagacgattcaa

SEQ ID NO: 275416 - DNA, 25 bp, Probe sequence
gtaagacgattcaaaccagagacat

SEQ ID NO: 275417 - DNA, 25 bp, Probe sequence
gtcgtactcgacattaccatataaa

SEQ ID NO: 275418 - DNA, 25 bp, Probe sequence
gtggttaccaaatacaacaagcaca

SEQ ID NO: 275419 - DNA, 25 bp, Probe sequence
gtggctgtcatgaataaagctgaaa

SEQ ID NO: 275420 - DNA, 25 bp, Probe sequence
ggacattggcatgcagtcatttatg

SEQ ID NO: 275421 - DNA, 25 bp, Probe sequence
tgttttccgacattttaatttattg

SEQ ID NO: 275422 - DNA, 25 bp, Probe sequence
tgacacacaacatatgacactccca

SEQ ID NO: 275423 - DNA, 25 bp, Probe sequence
taaaacaatgtttaagtcttccaca

SEQ ID NO: 275424 - DNA, 25 bp, Probe sequence
tattgcaacgtatccaaacgcacaa

SEQ ID NO: 275425 - DNA, 25 bp, Probe sequence
ttagctaaatattgcaacgtatcca

SEQ ID NO: 275426 - DNA, 25 bp, Probe sequence
ttggccttttgtgtaaacatggaca

SEQ ID NO: 275427 - DNA, 25 bp, Probe sequence
ttgctcaagacaaaactgccgaact

SEQ ID NO: 275428 - DNA, 25 bp, Probe sequence
atttttcgctttagatgacattagt

SEQ ID NO: 275429 - DNA, 25 bp, Probe sequence
atcacagttaatccagatatcttag

SEQ ID NO: 275430 - DNA, 25 bp, Probe sequence
atccagatatcttagtcattgacga

SEQ ID NO: 275431 - DNA, 25 bp, Probe sequence
agtggatcgtaatggtgaagtcagc

SEQ ID NO: 275432 - DNA, 25 bp, Probe sequence
agattattgaatttagtgaacttgg

SEQ ID NO: 275433 - DNA, 25 bp, Probe sequence
agaatatcgtatttatcgtacaaat

SEQ ID NO: 275434 - DNA, 25 bp, Probe sequence
accatctttttcgttagtcataact

SEQ ID NO: 275435 - DNA, 25 bp, Probe sequence
aaatgttatgtatgggctttaagcg

SEQ ID NO: 275436 - DNA, 25 bp, Probe sequence
aaagtattcaagtggtatgcgtgca

SEQ ID NO: 275437 - DNA, 25 bp, Probe sequence
aaagcgatgacacctaagattattg

SEQ ID NO: 275438 - DNA, 25 bp, Probe sequence
aaaagattacggtgaacttgatgat

SEQ ID NO: 275439 - DNA, 25 bp, Probe sequence
aacaaaacatttttcgctttagatg

SEQ ID NO: 275440 - DNA, 25 bp, Probe sequence
aatggtgaagtcagcgttatcgcaa

SEQ ID NO: 275441 - DNA, 25 bp, Probe sequence
aatcaacgttgagcaatatcattgg

SEQ ID NO: 275442 - DNA, 25 bp, Probe sequence
aattttgtactaagattgcttggat

SEQ ID NO: 275443 - DNA, 25 bp, Probe sequence
gcgctcattcccaaacataaaaaca

SEQ ID NO: 275444 - DNA, 25 bp, Probe sequence
gcgttatcgcaattagtgctggctt

SEQ ID NO: 275445 - DNA, 25 bp, Probe sequence
gaaggtctacaaatgaacgtttcgg

SEQ ID NO: 275446 - DNA, 25 bp, Probe sequence
gacgaagctttatctgtaggtgacc

SEQ ID NO: 275447 - DNA, 25 bp, Probe sequence
gacgtcatagggcttgttggcatca

SEQ ID NO: 275448 - DNA, 25 bp, Probe sequence
gagcaaaacaaaaccatctttttcg

SEQ ID NO: 275449 - DNA, 25 bp, Probe sequence
gagtggacaacttacagggattgaa

SEQ ID NO: 275450 - DNA, 25 bp, Probe sequence
gattgcttggattgaaggcggaaag

SEQ ID NO: 275451 - DNA, 25 bp, Probe sequence
gtaggtgaccaaacttttgcacaaa

SEQ ID NO: 275452 - DNA, 25 bp, Probe sequence
gtgctggcttgagtggacaacttac

SEQ ID NO: 275453 - DNA, 25 bp, Probe sequence
gtgaacttgatgatgtattacctaa

SEQ ID NO: 275454 - DNA, 25 bp, Probe sequence
gggcttgttggcatcaatggttccg

SEQ ID NO: 275455 - DNA, 25 bp, Probe sequence
ggtatgcgtgcaaaacttggttttt

SEQ ID NO: 275456 - DNA, 25 bp, Probe sequence
ggttccggcaaatcaacgttgagca

SEQ ID NO: 275457 - DNA, 25 bp, Probe sequence
tggcatcaatggttccggcaaatca

SEQ ID NO: 275458 - DNA, 25 bp, Probe sequence
tgaaagatgcgctcattcccaaaca

SEQ ID NO: 275459 - DNA, 25 bp, Probe sequence
tagtcattgacgaagctttatctgt

SEQ ID NO: 275460 - DNA, 25 bp, Probe sequence
tattacctaaatatgaagctttcct

SEQ ID NO: 275461 - DNA, 25 bp, Probe sequence
ttggtttttcaattaatatcacagt

SEQ ID NO: 275462 - DNA, 25 bp, Probe sequence
atttagaagataacagacatgtcta

SEQ ID NO: 275463 - DNA, 25 bp, Probe sequence
ataacagacatgtctatatgaaagg

SEQ ID NO: 275464 - DNA, 25 bp, Probe sequence
atgcccgaaatcattggaattgtta

SEQ ID NO: 275465 - DNA, 25 bp, Probe sequence
agtagattttacagatttagaagat

SEQ ID NO: 275466 - DNA, 25 bp, Probe sequence
agatttagaagataacagacatgtc

SEQ ID NO: 275467 - DNA, 25 bp, Probe sequence
agattttacagatttagaagataac

SEQ ID NO: 275468 - DNA, 25 bp, Probe sequence
agataacagacatgtctatatgaaa

SEQ ID NO: 275469 - DNA, 25 bp, Probe sequence
agacatgtctatatgaaagggcatg

SEQ ID NO: 275470 - DNA, 25 bp, Probe sequence
agaagataacagacatgtctatatg

SEQ ID NO: 275471 - DNA, 25 bp, Probe sequence
acatgtctatatgaaagggcatgtc

SEQ ID NO: 275472 - DNA, 25 bp, Probe sequence
acagatttagaagataacagacatg

SEQ ID NO: 275473 - DNA, 25 bp, Probe sequence
acagacatgtctatatgaaagggca

SEQ ID NO: 275474 - DNA, 25 bp, Probe sequence
aacagacatgtctatatgaaagggc

SEQ ID NO: 275475 - DNA, 25 bp, Probe sequence
aagataacagacatgtctatatgaa

SEQ ID NO: 275476 - DNA, 25 bp, Probe sequence
cagacatgtctatatgaaagggcat

SEQ ID NO: 275477 - DNA, 25 bp, Probe sequence
cgaaatcattggaattgttaaagta

SEQ ID NO: 275478 - DNA, 25 bp, Probe sequence
cccgaaatcattggaattgttaaag

SEQ ID NO: 275479 - DNA, 25 bp, Probe sequence
ccgaaatcattggaattgttaaagt

SEQ ID NO: 275480 - DNA, 25 bp, Probe sequence
gcccgaaatcattggaattgttaaa

SEQ ID NO: 275481 - DNA, 25 bp, Probe sequence
gaagataacagacatgtctatatga

SEQ ID NO: 275482 - DNA, 25 bp, Probe sequence
gaaatcattggaattgttaaagtag

SEQ ID NO: 275483 - DNA, 25 bp, Probe sequence
gacatgtctatatgaaagggcatgt

SEQ ID NO: 275484 - DNA, 25 bp, Probe sequence
gataacagacatgtctatatgaaag

SEQ ID NO: 275485 - DNA, 25 bp, Probe sequence
gatttagaagataacagacatgtct

SEQ ID NO: 275486 - DNA, 25 bp, Probe sequence
gattttacagatttagaagataaca

SEQ ID NO: 275487 - DNA, 25 bp, Probe sequence
gttaaagtagattttacagatttag

SEQ ID NO: 275488 - DNA, 25 bp, Probe sequence
gtagattttacagatttagaagata

SEQ ID NO: 275489 - DNA, 25 bp, Probe sequence
tgcccgaaatcattggaattgttaa

SEQ ID NO: 275490 - DNA, 25 bp, Probe sequence
tacagatttagaagataacagacat

SEQ ID NO: 275491 - DNA, 25 bp, Probe sequence
tagaagataacagacatgtctatat

SEQ ID NO: 275492 - DNA, 25 bp, Probe sequence
tagattttacagatttagaagataa

SEQ ID NO: 275493 - DNA, 25 bp, Probe sequence
tttagaagataacagacatgtctat

SEQ ID NO: 275494 - DNA, 25 bp, Probe sequence
ttagaagataacagacatgtctata

SEQ ID NO: 275495 - DNA, 25 bp, Probe sequence
ttacagatttagaagataacagaca

SEQ ID NO: 275496 - DNA, 25 bp, Probe sequence
attacgatggtgaagcagcgcttgc

SEQ ID NO: 275497 - DNA, 25 bp, Probe sequence
attagatattgtaacctcgactgaa

SEQ ID NO: 275498 - DNA, 25 bp, Probe sequence
atgccttaattgagggtctgtccta

SEQ ID NO: 275499 - DNA, 25 bp, Probe sequence
atgtacaatatcagcttgcatttaa

SEQ ID NO: 275500 - DNA, 25 bp, Probe sequence
aaacccatcaagaatactaggaagt

SEQ ID NO: 275501 - DNA, 25 bp, Probe sequence
aagatacgggtcgcgaggaattggt

SEQ ID NO: 275502 - DNA, 25 bp, Probe sequence
aaagcctatatctttgatgatacag

SEQ ID NO: 275503 - DNA, 25 bp, Probe sequence
aaacaacatttccaacattcttaga

SEQ ID NO: 275504 - DNA, 25 bp, Probe sequence
aaaaggcattttctagtgagttcta

SEQ ID NO: 275505 - DNA, 25 bp, Probe sequence
aacaccacggttatcgtgttcgaat

SEQ ID NO: 275506 - DNA, 25 bp, Probe sequence
aacgcgaatgcttttgttcgaccag

SEQ ID NO: 275507 - DNA, 25 bp, Probe sequence
aatggccacatatagattagttcaa

SEQ ID NO: 275508 - DNA, 25 bp, Probe sequence
caatggaattttgcagtattacctg

SEQ ID NO: 275509 - DNA, 25 bp, Probe sequence
aatctggggaatttcctgagtggat

SEQ ID NO: 275510 - DNA, 25 bp, Probe sequence
aatcctaaatttcttgagtcagctc

SEQ ID NO: 275511 - DNA, 25 bp, Probe sequence
aatttgatggaccgtttcattgaga

SEQ ID NO: 275512 - DNA, 25 bp, Probe sequence
gcttcatttatattcgcagtttgtg

SEQ ID NO: 275513 - DNA, 25 bp, Probe sequence
gcagcgcttgctttattgagattgt

SEQ ID NO: 275514 - DNA, 25 bp, Probe sequence
gaattatcctgatttaagcgtaaaa

SEQ ID NO: 275515 - DNA, 25 bp, Probe sequence
gacaactcacttattgaattatcct

SEQ ID NO: 275516 - DNA, 25 bp, Probe sequence
gagtcagctcagaaagtggctaaag

SEQ ID NO: 275517 - DNA, 25 bp, Probe sequence
gattttggtatagcatttgatagtc

SEQ ID NO: 275518 - DNA, 25 bp, Probe sequence
gattcttttatcctgaaattgctat

SEQ ID NO: 275519 - DNA, 25 bp, Probe sequence
gtacatgaactatatagcgaaggct

SEQ ID NO: 275520 - DNA, 25 bp, Probe sequence
gtggctaaaggtattctttcaatga

SEQ ID NO: 275521 - DNA, 25 bp, Probe sequence
ggcaatatcatgatcattggttagg

SEQ ID NO: 275522 - DNA, 25 bp, Probe sequence
tgttcgaccagataatactactaaa

SEQ ID NO: 275523 - DNA, 25 bp, Probe sequence
tgctatgtattttaaaaacccatca

SEQ ID NO: 275524 - DNA, 25 bp, Probe sequence
tcttcttctacttatgccttaattg

SEQ ID NO: 275525 - DNA, 25 bp, Probe sequence
taggtaaaagcttacaacctgttga

SEQ ID NO: 275526 - DNA, 25 bp, Probe sequence
taaattctatacacaaggtttcttt

SEQ ID NO: 275527 - DNA, 25 bp, Probe sequence
tagttcaaattaatccacaagacaa

SEQ ID NO: 275528 - DNA, 25 bp, Probe sequence
tatggatattttcctcattttgata

SEQ ID NO: 275529 - DNA, 25 bp, Probe sequence
ttgagggtctgtcctatttaggtaa

SEQ ID NO: 275530 - DNA, 25 bp, Probe sequence
atttgcacaatgaaactggcgtatc

SEQ ID NO: 275531 - DNA, 25 bp, Probe sequence
atgaaactggcgtatcaagatcaac

SEQ ID NO: 275532 - DNA, 25 bp, Probe sequence
agatttgcacaatgaaactggcgta

SEQ ID NO: 275533 - DNA, 25 bp, Probe sequence
acgaagtattcgcaactaatttaag

SEQ ID NO: 275534 - DNA, 25 bp, Probe sequence
actggcgtatcaagatcaactatta

SEQ ID NO: 275535 - DNA, 25 bp, Probe sequence
acaatgaaactggcgtatcaagatc

SEQ ID NO: 275536 - DNA, 25 bp, Probe sequence
aaactggcgtatcaagatcaactat

SEQ ID NO: 275537 - DNA, 25 bp, Probe sequence
aaaagctgagatggttaacttaaat

SEQ ID NO: 275538 - DNA, 25 bp, Probe sequence
aacggaaaagctgagatggttaact

SEQ ID NO: 275539 - DNA, 25 bp, Probe sequence
aactggcgtatcaagatcaactatt

SEQ ID NO: 275540 - DNA, 25 bp, Probe sequence
aagatttgcacaatgaaactggcgt

SEQ ID NO: 275541 - DNA, 25 bp, Probe sequence
caatgaaactggcgtatcaagatca

SEQ ID NO: 275542 - DNA, 25 bp, Probe sequence
caagatttgcacaatgaaactggcg

SEQ ID NO: 275543 - DNA, 25 bp, Probe sequence
ctggcgtatcaagatcaactattag

SEQ ID NO: 275544 - DNA, 25 bp, Probe sequence
cgtatcaagatcaactattagtgga

SEQ ID NO: 275545 - DNA, 25 bp, Probe sequence
gcgtatcaagatcaactattagtgg

SEQ ID NO: 275546 - DNA, 25 bp, Probe sequence
gcacaatgaaactggcgtatcaaga

SEQ ID NO: 275547 - DNA, 25 bp, Probe sequence
gaacgaagtattcgcaactaattta

SEQ ID NO: 275548 - DNA, 25 bp, Probe sequence
gaaactggcgtatcaagatcaacta

SEQ ID NO: 275549 - DNA, 25 bp, Probe sequence
gatttgcacaatgaaactggcgtat

SEQ ID NO: 275550 - DNA, 25 bp, Probe sequence
gttgaacgaagtattcgcaactaat

SEQ ID NO: 275551 - DNA, 25 bp, Probe sequence
gtatcaagatcaactattagtggat

SEQ ID NO: 275552 - DNA, 25 bp, Probe sequence
gtaatcatggctagagataacgtaa

SEQ ID NO: 275553 - DNA, 25 bp, Probe sequence
ggatataaaaacggaaaagctgaga

SEQ ID NO: 275554 - DNA, 25 bp, Probe sequence
ggaaaagctgagatggttaacttaa

SEQ ID NO: 275555 - DNA, 25 bp, Probe sequence
ggcgtatcaagatcaactattagtg

SEQ ID NO: 275556 - DNA, 25 bp, Probe sequence
tggcgtatcaagatcaactattagt

SEQ ID NO: 275557 - DNA, 25 bp, Probe sequence
tgaaactggcgtatcaagatcaact

SEQ ID NO: 275558 - DNA, 25 bp, Probe sequence
tgaagttgaacgaagtattcgcaac

SEQ ID NO: 275559 - DNA, 25 bp, Probe sequence
tgcacaatgaaactggcgtatcaag

SEQ ID NO: 275560 - DNA, 25 bp, Probe sequence
tcatggctagagataacgtaagtgt

SEQ ID NO: 275561 - DNA, 25 bp, Probe sequence
tcaagatcaactattagtggatata

SEQ ID NO: 275562 - DNA, 25 bp, Probe sequence
tttgcacaatgaaactggcgtatca

SEQ ID NO: 275563 - DNA, 25 bp, Probe sequence
ttgcacaatgaaactggcgtatcaa

SEQ ID NO: 275564 - DNA, 25 bp, Probe sequence
atttttggcacatgatttaatttat

SEQ ID NO: 275565 - DNA, 25 bp, Probe sequence
atagaagtccaccttacaacaaaga

SEQ ID NO: 275566 - DNA, 25 bp, Probe sequence
atactttttggtatgatatgatgcc

SEQ ID NO: 275567 - DNA, 25 bp, Probe sequence
atgagtttaacagttcaccatatga

SEQ ID NO: 275568 - DNA, 25 bp, Probe sequence
agaagtccaccttacaacaaagaat

SEQ ID NO: 275569 - DNA, 25 bp, Probe sequence
acggcaatactttttggtatgatat

SEQ ID NO: 275570 - DNA, 25 bp, Probe sequence
acatgaaggaaaccactttgataat

SEQ ID NO: 275571 - DNA, 25 bp, Probe sequence
acagctcaagaactagacataaaag

SEQ ID NO: 275572 - DNA, 25 bp, Probe sequence
aaaacatgaaggaaaccactttgat

SEQ ID NO: 275573 - DNA, 25 bp, Probe sequence
aacttgtatgtatggaggaataaca

SEQ ID NO: 275574 - DNA, 25 bp, Probe sequence
aagtccaccttacaacaaagaatgg

SEQ ID NO: 275575 - DNA, 25 bp, Probe sequence
aagatagaagtccaccttacaacaa

SEQ ID NO: 275576 - DNA, 25 bp, Probe sequence
aagtgtaacagctcaagaactagac

SEQ ID NO: 275577 - DNA, 25 bp, Probe sequence
ccaccttacaacaaagaatggataa

SEQ ID NO: 275578 - DNA, 25 bp, Probe sequence
gaaggaaaccactttgataatggga

SEQ ID NO: 275579 - DNA, 25 bp, Probe sequence
gaagtccaccttacaacaaagaatg

SEQ ID NO: 275580 - DNA, 25 bp, Probe sequence
gaagatagaagtccaccttacaaca

SEQ ID NO: 275581 - DNA, 25 bp, Probe sequence
gaaaagtgtaacagctcaagaacta

SEQ ID NO: 275582 - DNA, 25 bp, Probe sequence
gatagaagtccaccttacaacaaag

SEQ ID NO: 275583 - DNA, 25 bp, Probe sequence
gtttaacagttcaccatatgaaaca

SEQ ID NO: 275584 - DNA, 25 bp, Probe sequence
gtatgagtttaacagttcaccatat

SEQ ID NO: 275585 - DNA, 25 bp, Probe sequence
gtagataaatttttggcacatgatt

SEQ ID NO: 275586 - DNA, 25 bp, Probe sequence
gtaacagctcaagaactagacataa

SEQ ID NO: 275587 - DNA, 25 bp, Probe sequence
gtctgtagataaatttttggcacat

SEQ ID NO: 275588 - DNA, 25 bp, Probe sequence
gtgaagatagaagtccaccttacaa

SEQ ID NO: 275589 - DNA, 25 bp, Probe sequence
gtgtaacagctcaagaactagacat

SEQ ID NO: 275590 - DNA, 25 bp, Probe sequence
ggatcaaattactatgtaaactgct

SEQ ID NO: 275591 - DNA, 25 bp, Probe sequence
ggcacatgatttaatttataacatt

SEQ ID NO: 275592 - DNA, 25 bp, Probe sequence
tgagtttaacagttcaccatatgaa

SEQ ID NO: 275593 - DNA, 25 bp, Probe sequence
taacggcaatactttttggtatgat

SEQ ID NO: 275594 - DNA, 25 bp, Probe sequence
tttggcacatgatttaatttataac

SEQ ID NO: 275595 - DNA, 25 bp, Probe sequence
tttgtatgagtttaacagttcacca

SEQ ID NO: 275596 - DNA, 25 bp, Probe sequence
ttttcatccaaagataatgtaggta

SEQ ID NO: 275597 - DNA, 25 bp, Probe sequence
ttaacagttcaccatatgaaacagg

SEQ ID NO: 275598 - DNA, 25 bp, Probe sequence
atcgaacagcactttgatttagacg

SEQ ID NO: 275599 - DNA, 25 bp, Probe sequence
agtcgacagagagaaacaccttgaa

SEQ ID NO: 275600 - DNA, 25 bp, Probe sequence
agcactttgatttagacgaagaaga

SEQ ID NO: 275601 - DNA, 25 bp, Probe sequence
acgaagtcgacagagagaaacacct

SEQ ID NO: 275602 - DNA, 25 bp, Probe sequence
actcttactgtgacatatgcaggcg

SEQ ID NO: 275603 - DNA, 25 bp, Probe sequence
acatacacacacaaagatactctta

SEQ ID NO: 275604 - DNA, 25 bp, Probe sequence
acacacacaaagatactcttactgt

SEQ ID NO: 275605 - DNA, 25 bp, Probe sequence
aacaaaagtcaaacatacacacaca

SEQ ID NO: 275606 - DNA, 25 bp, Probe sequence
aacagcactttgatttagacgaaga

SEQ ID NO: 275607 - DNA, 25 bp, Probe sequence
aagatactcttactgtgacatatgc

SEQ ID NO: 275608 - DNA, 25 bp, Probe sequence
aattgaccaaatcgaacagcacttt

SEQ ID NO: 275609 - DNA, 25 bp, Probe sequence
caaagatactcttactgtgacatat

SEQ ID NO: 275610 - DNA, 25 bp, Probe sequence
caggcgagattgagcacacttacga

SEQ ID NO: 275611 - DNA, 25 bp, Probe sequence
cgaacagcactttgatttagacgaa

SEQ ID NO: 275612 - DNA, 25 bp, Probe sequence
gcgagattgagcacacttacgaagt

SEQ ID NO: 275613 - DNA, 25 bp, Probe sequence
gcaggcgagattgagcacacttacg

SEQ ID NO: 275614 - DNA, 25 bp, Probe sequence
gcacacttacgaagtcgacagagag

SEQ ID NO: 275615 - DNA, 25 bp, Probe sequence
gaaacaccttgaatcaatgattgag

SEQ ID NO: 275616 - DNA, 25 bp, Probe sequence
gacagagagaaacaccttgaatcaa

SEQ ID NO: 275617 - DNA, 25 bp, Probe sequence
gaccaaatcgaacagcactttgatt

SEQ ID NO: 275618 - DNA, 25 bp, Probe sequence
gagcacacttacgaagtcgacagag

SEQ ID NO: 275619 - DNA, 25 bp, Probe sequence
gagagaaacaccttgaatcaatgat

SEQ ID NO: 275620 - DNA, 25 bp, Probe sequence
gagattgagcacacttacgaagtcg

SEQ ID NO: 275621 - DNA, 25 bp, Probe sequence
gatactcttactgtgacatatgcag

SEQ ID NO: 275622 - DNA, 25 bp, Probe sequence
gattgagtgggcaattgaccaaatc

SEQ ID NO: 275623 - DNA, 25 bp, Probe sequence
gattgagcacacttacgaagtcgac

SEQ ID NO: 275624 - DNA, 25 bp, Probe sequence
gtattaacactttatgcagttaaag

SEQ ID NO: 275625 - DNA, 25 bp, Probe sequence
gtcaaacatacacacacaaagatac

SEQ ID NO: 275626 - DNA, 25 bp, Probe sequence
gtgacatatgcaggcgagattgagc

SEQ ID NO: 275627 - DNA, 25 bp, Probe sequence
ggcgagattgagcacacttacgaag

SEQ ID NO: 275628 - DNA, 25 bp, Probe sequence
tcttactgtgacatatgcaggcgag

SEQ ID NO: 275629 - DNA, 25 bp, Probe sequence
tactgtgacatatgcaggcgagatt

SEQ ID NO: 275630 - DNA, 25 bp, Probe sequence
tatagtattaacactttatgcagtt

SEQ ID NO: 275631 - DNA, 25 bp, Probe sequence
ttgagcacacttacgaagtcgacag

SEQ ID NO: 275632 - DNA, 25 bp, Probe sequence
attgcgtatgcttatgggcatataa

SEQ ID NO: 275633 - DNA, 25 bp, Probe sequence
acccaagagcaagttaacattaaat

SEQ ID NO: 275634 - DNA, 25 bp, Probe sequence
acgtgatatgaaaatgtgggtgctt

SEQ ID NO: 275635 - DNA, 25 bp, Probe sequence
aaaccttagatgctattcaaaaaga

SEQ ID NO: 275636 - DNA, 25 bp, Probe sequence
aaaacaatgctcagcacactcaacg

SEQ ID NO: 275637 - DNA, 25 bp, Probe sequence
aacaatgctcagcacactcaacgaa

SEQ ID NO: 275638 - DNA, 25 bp, Probe sequence
aaaatgataagaacatacgtgatat

SEQ ID NO: 275639 - DNA, 25 bp, Probe sequence
aacacgaacatgaatggcgcatcag

SEQ ID NO: 275640 - DNA, 25 bp, Probe sequence
aatgtgggtgcttggtttagttggg

SEQ ID NO: 275641 - DNA, 25 bp, Probe sequence
aatgctcagcacactcaacgaaatt

SEQ ID NO: 275642 - DNA, 25 bp, Probe sequence
caatatttgggtcgctaattatagc

SEQ ID NO: 275643 - DNA, 25 bp, Probe sequence
caatgctcagcacactcaacgaaat

SEQ ID NO: 275644 - DNA, 25 bp, Probe sequence
cacgaacatgaatggcgcatcagaa

SEQ ID NO: 275645 - DNA, 25 bp, Probe sequence
ctcagcacactcaacgaaattaaat

SEQ ID NO: 275646 - DNA, 25 bp, Probe sequence
gcattattgcgtatgcttatgggca

SEQ ID NO: 275647 - DNA, 25 bp, Probe sequence
gcacactcaacgaaattaaattagg

SEQ ID NO: 275648 - DNA, 25 bp, Probe sequence
gaatgataaaacaatgctcagcaca

SEQ ID NO: 275649 - DNA, 25 bp, Probe sequence
gaatggcgcatcagaaggttagaag

SEQ ID NO: 275650 - DNA, 25 bp, Probe sequence
gaacatgaatggcgcatcagaaggt

SEQ ID NO: 275651 - DNA, 25 bp, Probe sequence
gaaaatgtgggtgcttggtttagtt

SEQ ID NO: 275652 - DNA, 25 bp, Probe sequence
gataaaaccttagatgctattcaaa

SEQ ID NO: 275653 - DNA, 25 bp, Probe sequence
gatatgaaaatgtgggtgcttggtt

SEQ ID NO: 275654 - DNA, 25 bp, Probe sequence
gttgggacaatatttgggtcgctaa

SEQ ID NO: 275655 - DNA, 25 bp, Probe sequence
gtcgctaattatagcattattgcgt

SEQ ID NO: 275656 - DNA, 25 bp, Probe sequence
gtgcttggtttagttgggacaatat

SEQ ID NO: 275657 - DNA, 25 bp, Probe sequence
gtgggtgcttggtttagttgggaca

SEQ ID NO: 275658 - DNA, 25 bp, Probe sequence
gggtggttcaaaaaacacgaacatg

SEQ ID NO: 275659 - DNA, 25 bp, Probe sequence
gggtgcttggtttagttgggacaat

SEQ ID NO: 275660 - DNA, 25 bp, Probe sequence
ggacaatatttgggtcgctaattat

SEQ ID NO: 275661 - DNA, 25 bp, Probe sequence
ggcgcatcagaaggttagaagagaa

SEQ ID NO: 275662 - DNA, 25 bp, Probe sequence
tgggacaatatttgggtcgctaatt

SEQ ID NO: 275663 - DNA, 25 bp, Probe sequence
tgctcagcacactcaacgaaattaa

SEQ ID NO: 275664 - DNA, 25 bp, Probe sequence
ttaggtcaaaaaacccaagagcaag

SEQ ID NO: 275665 - DNA, 25 bp, Probe sequence
ttagataaaaccttagatgctattc

SEQ ID NO: 275666 - DNA, 25 bp, Probe sequence
attgatatgtctaagcacaaagcta

SEQ ID NO: 275667 - DNA, 25 bp, Probe sequence
attcaactgatatgcgagacgcaag

SEQ ID NO: 275668 - DNA, 25 bp, Probe sequence
attacaaaccgaccaactgaagtga

SEQ ID NO: 275669 - DNA, 25 bp, Probe sequence
atgtctaagcacaaagctattaaga

SEQ ID NO: 275670 - DNA, 25 bp, Probe sequence
aaaaccgttattgatatgtctaagc

SEQ ID NO: 275671 - DNA, 25 bp, Probe sequence
aaccgttattgatatgtctaagcac

SEQ ID NO: 275672 - DNA, 25 bp, Probe sequence
aaccgaccaactgaagtgaacgaca

SEQ ID NO: 275673 - DNA, 25 bp, Probe sequence
caaaccgaccaactgaagtgaacga

SEQ ID NO: 275674 - DNA, 25 bp, Probe sequence
cagaaacaattgagtacgagaaggt

SEQ ID NO: 275675 - DNA, 25 bp, Probe sequence
ccgaccaactgaagtgaacgacaca

SEQ ID NO: 275676 - DNA, 25 bp, Probe sequence
ccgttattgatatgtctaagcacaa

SEQ ID NO: 275677 - DNA, 25 bp, Probe sequence
gcagactgtaacttatctaatcaag

SEQ ID NO: 275678 - DNA, 25 bp, Probe sequence
gcaagagaattcgacggactagaca

SEQ ID NO: 275679 - DNA, 25 bp, Probe sequence
gaattcgacggactagacaaaaccg

SEQ ID NO: 275680 - DNA, 25 bp, Probe sequence
gaagtgaacgacacagtgaagtatt

SEQ ID NO: 275681 - DNA, 25 bp, Probe sequence
gaagcagactgtaacttatctaatc

SEQ ID NO: 275682 - DNA, 25 bp, Probe sequence
gaacgacacagtgaagtattcaact

SEQ ID NO: 275683 - DNA, 25 bp, Probe sequence
gagacgcaagagaattcgacggact

SEQ ID NO: 275684 - DNA, 25 bp, Probe sequence
gactgtaacttatctaatcaagcat

SEQ ID NO: 275685 - DNA, 25 bp, Probe sequence
gacgcaagagaattcgacggactag

SEQ ID NO: 275686 - DNA, 25 bp, Probe sequence
gagaattcgacggactagacaaaac

SEQ ID NO: 275687 - DNA, 25 bp, Probe sequence
gaccaactgaagtgaacgacacagt

SEQ ID NO: 275688 - DNA, 25 bp, Probe sequence
gatatgtctaagcacaaagctatta

SEQ ID NO: 275689 - DNA, 25 bp, Probe sequence
gtattcaactgatatgcgagacgca

SEQ ID NO: 275690 - DNA, 25 bp, Probe sequence
gtaacttatctaatcaagcataaag

SEQ ID NO: 275691 - DNA, 25 bp, Probe sequence
gtgaagtattcaactgatatgcgag

SEQ ID NO: 275692 - DNA, 25 bp, Probe sequence
ggactagacaaaaccgttattgata

SEQ ID NO: 275693 - DNA, 25 bp, Probe sequence
tcgacggactagacaaaaccgttat

SEQ ID NO: 275694 - DNA, 25 bp, Probe sequence
tgaaaatctatttattacaaaccga

SEQ ID NO: 275695 - DNA, 25 bp, Probe sequence
tctatttattacaaaccgaccaact

SEQ ID NO: 275696 - DNA, 25 bp, Probe sequence
tacaaaccgaccaactgaagtgaac

SEQ ID NO: 275697 - DNA, 25 bp, Probe sequence
tattacaaaccgaccaactgaagtg

SEQ ID NO: 275698 - DNA, 25 bp, Probe sequence
tatttattacaaaccgaccaactga

SEQ ID NO: 275699 - DNA, 25 bp, Probe sequence
tttattacaaaccgaccaactgaag

SEQ ID NO: 275700 - DNA, 25 bp, Probe sequence
actggggctaacaccatcgtagtta

SEQ ID NO: 275701 - DNA, 25 bp, Probe sequence
attgcgataattataatttttggca

SEQ ID NO: 275702 - DNA, 25 bp, Probe sequence
atttcaacaacctgaacacaatggt

SEQ ID NO: 275703 - DNA, 25 bp, Probe sequence
atttgattatgctattgctgctata

SEQ ID NO: 275704 - DNA, 25 bp, Probe sequence
atatttgattatgctattgctgcta

SEQ ID NO: 275705 - DNA, 25 bp, Probe sequence
atcaggtactggggctaacaccatc

SEQ ID NO: 275706 - DNA, 25 bp, Probe sequence
caggtactggggctaacaccatcgt

SEQ ID NO: 275707 - DNA, 25 bp, Probe sequence
aaataatggaagtaactctcaaatt

SEQ ID NO: 275708 - DNA, 25 bp, Probe sequence
aacacaaactacaacccacgaagct

SEQ ID NO: 275709 - DNA, 25 bp, Probe sequence
aacacaatggttcagaatggacaat

SEQ ID NO: 275710 - DNA, 25 bp, Probe sequence
aactacaacccacgaagctacaatg

SEQ ID NO: 275711 - DNA, 25 bp, Probe sequence
aatgcaaataataaatcaggtactg

SEQ ID NO: 275712 - DNA, 25 bp, Probe sequence
aatttttggcatattagcacctgtt

SEQ ID NO: 275713 - DNA, 25 bp, Probe sequence
caacccacgaagctacaatgaatca

SEQ ID NO: 275714 - DNA, 25 bp, Probe sequence
ctacaacccacgaagctacaatgaa

SEQ ID NO: 275715 - DNA, 25 bp, Probe sequence
cccacgaagctacaatgaatcaaca

SEQ ID NO: 275716 - DNA, 25 bp, Probe sequence
gaatccagagaatgaaagttcaagt

SEQ ID NO: 275717 - DNA, 25 bp, Probe sequence
gaagtaactctcaaattattagtga

SEQ ID NO: 275718 - DNA, 25 bp, Probe sequence
gaaacagttcaaatatggatggacc

SEQ ID NO: 275719 - DNA, 25 bp, Probe sequence
gaaacatctaataatatgaatccag

SEQ ID NO: 275720 - DNA, 25 bp, Probe sequence
gatttattaaaatttcaacaacctg

SEQ ID NO: 275721 - DNA, 25 bp, Probe sequence
gattatgctattgctgctataaata

SEQ ID NO: 275722 - DNA, 25 bp, Probe sequence
gtactggggctaacaccatcgtagt

SEQ ID NO: 275723 - DNA, 25 bp, Probe sequence
ggtactggggctaacaccatcgtag

SEQ ID NO: 275724 - DNA, 25 bp, Probe sequence
ggggctaacaccatcgtagttaaag

SEQ ID NO: 275725 - DNA, 25 bp, Probe sequence
ggtaactagagataacatatttgat

SEQ ID NO: 275726 - DNA, 25 bp, Probe sequence
ggttcagaatggacaattaatgcaa

SEQ ID NO: 275727 - DNA, 25 bp, Probe sequence
ggctaacaccatcgtagttaaagat

SEQ ID NO: 275728 - DNA, 25 bp, Probe sequence
ggcatattagcacctgttgtttttt

SEQ ID NO: 275729 - DNA, 25 bp, Probe sequence
tagcacctgttgtttttttgttaca

SEQ ID NO: 275730 - DNA, 25 bp, Probe sequence
tatggatggacctaaaacatctatg

SEQ ID NO: 275731 - DNA, 25 bp, Probe sequence
tattagcacctgttgtttttttgtt

SEQ ID NO: 275732 - DNA, 25 bp, Probe sequence
ttttggcatattagcacctgttgtt

SEQ ID NO: 275733 - DNA, 25 bp, Probe sequence
ttggcatattagcacctgttgtttt

SEQ ID NO: 275734 - DNA, 25 bp, Probe sequence
agaagtaataaaattttgcgtgtct

SEQ ID NO: 275735 - DNA, 25 bp, Probe sequence
actggttcattataaccttctcctt

SEQ ID NO: 275736 - DNA, 25 bp, Probe sequence
accttctccttactggttataatga

SEQ ID NO: 275737 - DNA, 25 bp, Probe sequence
aactgacattaagcgttcattataa

SEQ ID NO: 275738 - DNA, 25 bp, Probe sequence
aaccttctccttactggttataatg

SEQ ID NO: 275739 - DNA, 25 bp, Probe sequence
aagcgttcattataaccaattaatt

SEQ ID NO: 275740 - DNA, 25 bp, Probe sequence
caattaattttgatttggttgataa

SEQ ID NO: 275741 - DNA, 25 bp, Probe sequence
cattataaccttctccttactggtt

SEQ ID NO: 275742 - DNA, 25 bp, Probe sequence
cattaagcgttcattataaccaatt

SEQ ID NO: 275743 - DNA, 25 bp, Probe sequence
cttctccttactggttataatgaac

SEQ ID NO: 275744 - DNA, 25 bp, Probe sequence
cttactggttcattataaccttctc

SEQ ID NO: 275745 - DNA, 25 bp, Probe sequence
cttactggttataatgaactgacat

SEQ ID NO: 275746 - DNA, 25 bp, Probe sequence
ctcctttccatttttttcattatga

SEQ ID NO: 275747 - DNA, 25 bp, Probe sequence
ctgacattaagcgttcattataacc

SEQ ID NO: 275748 - DNA, 25 bp, Probe sequence
ctggttcattataaccttctcctta

SEQ ID NO: 275749 - DNA, 25 bp, Probe sequence
ccttctccttactggttataatgaa

SEQ ID NO: 275750 - DNA, 25 bp, Probe sequence
gcgttcattataaccaattaatttt

SEQ ID NO: 275751 - DNA, 25 bp, Probe sequence
gacattaagcgttcattataaccaa

SEQ ID NO: 275752 - DNA, 25 bp, Probe sequence
ggttcattataaccttctccttact

SEQ ID NO: 275753 - DNA, 25 bp, Probe sequence
tggttcattataaccttctccttac

SEQ ID NO: 275754 - DNA, 25 bp, Probe sequence
tccttactggttcattataaccttc

SEQ ID NO: 275755 - DNA, 25 bp, Probe sequence
tccttactggttataatgaactgac

SEQ ID NO: 275756 - DNA, 25 bp, Probe sequence
tctccttactggttcattataacct

SEQ ID NO: 275757 - DNA, 25 bp, Probe sequence
tctccttactggttataatgaactg

SEQ ID NO: 275758 - DNA, 25 bp, Probe sequence
tctcctttccatttttttcattatg

SEQ ID NO: 275759 - DNA, 25 bp, Probe sequence
tcattataaccttctccttactggt

SEQ ID NO: 275760 - DNA, 25 bp, Probe sequence
taaccttctccttactggttataat

SEQ ID NO: 275761 - DNA, 25 bp, Probe sequence
tactggttcattataaccttctcct

SEQ ID NO: 275762 - DNA, 25 bp, Probe sequence
tataaccttctccttactggttata

SEQ ID NO: 275763 - DNA, 25 bp, Probe sequence
ttataaccttctccttactggttat

SEQ ID NO: 275764 - DNA, 25 bp, Probe sequence
ttactggttcattataaccttctcc

SEQ ID NO: 275765 - DNA, 25 bp, Probe sequence
ttaagcgttcattataaccaattaa

SEQ ID NO: 275766 - DNA, 25 bp, Probe sequence
ttctccttactggttataatgaact

SEQ ID NO: 275767 - DNA, 25 bp, Probe sequence
ttctccttactggttcattataacc

SEQ ID NO: 275768 - DNA, 25 bp, Probe sequence
agtgggaaacaacgcccatggagag

SEQ ID NO: 275769 - DNA, 25 bp, Probe sequence
attggaggcgtgctatgaaaaatag

SEQ ID NO: 275770 - DNA, 25 bp, Probe sequence
attcggttaagtcatctgatttttt

SEQ ID NO: 275771 - DNA, 25 bp, Probe sequence
atattcggttaagtcatctgatttt

SEQ ID NO: 275772 - DNA, 25 bp, Probe sequence
agtttgtaattggaggcgtgctatg

SEQ ID NO: 275773 - DNA, 25 bp, Probe sequence
aaatattcggttaagtcatctgatt

SEQ ID NO: 275774 - DNA, 25 bp, Probe sequence
aaatagttatcaagctcaaaaagtg

SEQ ID NO: 275775 - DNA, 25 bp, Probe sequence
aaagtgggaaacaacgcccatggag

SEQ ID NO: 275776 - DNA, 25 bp, Probe sequence
aaaatagttatcaagctcaaaaagt

SEQ ID NO: 275777 - DNA, 25 bp, Probe sequence
aagtgggaaacaacgcccatggaga

SEQ ID NO: 275778 - DNA, 25 bp, Probe sequence
aatattcggttaagtcatctgattt

SEQ ID NO: 275779 - DNA, 25 bp, Probe sequence
aattggaggcgtgctatgaaaaata

SEQ ID NO: 275780 - DNA, 25 bp, Probe sequence
cagtttgtaattggaggcgtgctat

SEQ ID NO: 275781 - DNA, 25 bp, Probe sequence
gaaaagtgggaaacaacgcccatgg

SEQ ID NO: 275782 - DNA, 25 bp, Probe sequence
gaaacaacgcccatggagagaaaag

SEQ ID NO: 275783 - DNA, 25 bp, Probe sequence
gatatgacgaaaagtgggaaacaac

SEQ ID NO: 275784 - DNA, 25 bp, Probe sequence
gttatcaagctcaaaaagtgattga

SEQ ID NO: 275785 - DNA, 25 bp, Probe sequence
gtttgtaattggaggcgtgctatga

SEQ ID NO: 275786 - DNA, 25 bp, Probe sequence
gtaaaacaatgtggtaacgtcttag

SEQ ID NO: 275787 - DNA, 25 bp, Probe sequence
gtaattggaggcgtgctatgaaaaa

SEQ ID NO: 275788 - DNA, 25 bp, Probe sequence
gtgggaaacaacgcccatggagaga

SEQ ID NO: 275789 - DNA, 25 bp, Probe sequence
gggaaacaacgcccatggagagaaa

SEQ ID NO: 275790 - DNA, 25 bp, Probe sequence
ggttaagtcatctgattttttaact

SEQ ID NO: 275791 - DNA, 25 bp, Probe sequence
ggaggcgtgctatgaaaaatagtta

SEQ ID NO: 275792 - DNA, 25 bp, Probe sequence
ggaaacaacgcccatggagagaaaa

SEQ ID NO: 275793 - DNA, 25 bp, Probe sequence
tgtaattggaggcgtgctatgaaaa

SEQ ID NO: 275794 - DNA, 25 bp, Probe sequence
tcggttaagtcatctgattttttaa

SEQ ID NO: 275795 - DNA, 25 bp, Probe sequence
taattggaggcgtgctatgaaaaat

SEQ ID NO: 275796 - DNA, 25 bp, Probe sequence
taaaacaatgtggtaacgtcttaga

SEQ ID NO: 275797 - DNA, 25 bp, Probe sequence
tattcggttaagtcatctgattttt

SEQ ID NO: 275798 - DNA, 25 bp, Probe sequence
tttgtaattggaggcgtgctatgaa

SEQ ID NO: 275799 - DNA, 25 bp, Probe sequence
ttaagtcatctgattttttaactga

SEQ ID NO: 275800 - DNA, 25 bp, Probe sequence
ttcggttaagtcatctgatttttta

SEQ ID NO: 275801 - DNA, 25 bp, Probe sequence
ttgtaattggaggcgtgctatgaaa

SEQ ID NO: 275802 - DNA, 25 bp, Probe sequence
atccctaaagtattctttaccagtg

SEQ ID NO: 275803 - DNA, 25 bp, Probe sequence
acgtgatcgcttaaatttatctatt

SEQ ID NO: 275804 - DNA, 25 bp, Probe sequence
aaatcaatattttacagtgcaagaa

SEQ ID NO: 275805 - DNA, 25 bp, Probe sequence
aaagctaatggaaatcttaaattgt

SEQ ID NO: 275806 - DNA, 25 bp, Probe sequence
aatgctattgcaagaattcccagaa

SEQ ID NO: 275807 - DNA, 25 bp, Probe sequence
aatcgaacactaatgatactgactt

SEQ ID NO: 275808 - DNA, 25 bp, Probe sequence
aatcattcaaatcaatttacacata

SEQ ID NO: 275809 - DNA, 25 bp, Probe sequence
cacagaacgtgatatttacaaaata

SEQ ID NO: 275810 - DNA, 25 bp, Probe sequence
ctactcattcaaaaacgacgtggtt

SEQ ID NO: 275811 - DNA, 25 bp, Probe sequence
ctgggttgatgaagatggtaacatt

SEQ ID NO: 275812 - DNA, 25 bp, Probe sequence
gcctatgctatcttacgtgatcgct

SEQ ID NO: 275813 - DNA, 25 bp, Probe sequence
gctatcttacgtgatcgcttaaatt

SEQ ID NO: 275814 - DNA, 25 bp, Probe sequence
gcaagaattcccagaacaactaact

SEQ ID NO: 275815 - DNA, 25 bp, Probe sequence
gaataatgatatgaatgacttgaat

SEQ ID NO: 275816 - DNA, 25 bp, Probe sequence
gaacgtccagaagttcgaaaatcga

SEQ ID NO: 275817 - DNA, 25 bp, Probe sequence
gaaaacgatggtctactcattcaaa

SEQ ID NO: 275818 - DNA, 25 bp, Probe sequence
gaaatcataaaggctgttattctta

SEQ ID NO: 275819 - DNA, 25 bp, Probe sequence
gaaattagtaatcattcaaatcaat

SEQ ID NO: 275820 - DNA, 25 bp, Probe sequence
gacattgactttaatgatactgaga

SEQ ID NO: 275821 - DNA, 25 bp, Probe sequence
gatggtctactcattcaaaaacgac

SEQ ID NO: 275822 - DNA, 25 bp, Probe sequence
gaggatgaaatattaacttctttaa

SEQ ID NO: 275823 - DNA, 25 bp, Probe sequence
gatactgactttaatgacattgact

SEQ ID NO: 275824 - DNA, 25 bp, Probe sequence
gatatgcattacatgttagaggaca

SEQ ID NO: 275825 - DNA, 25 bp, Probe sequence
gtattctttaccagtgaaaattata

SEQ ID NO: 275826 - DNA, 25 bp, Probe sequence
tggtaacatttactttgtttattca

SEQ ID NO: 275827 - DNA, 25 bp, Probe sequence
tgataggggagttaaaggccaaaag

SEQ ID NO: 275828 - DNA, 25 bp, Probe sequence
tgaaacctattgtcacagaacgtga

SEQ ID NO: 275829 - DNA, 25 bp, Probe sequence
tctatatttaatgaaacctattgtc

SEQ ID NO: 275830 - DNA, 25 bp, Probe sequence
taaaggctgttattcttaaagcaaa

SEQ ID NO: 275831 - DNA, 25 bp, Probe sequence
tagcctatgctatcttacgtgatcg

SEQ ID NO: 275832 - DNA, 25 bp, Probe sequence
tatgctatcttacgtgatcgcttaa

SEQ ID NO: 275833 - DNA, 25 bp, Probe sequence
ttatcaaatccctaaagtattcttt

SEQ ID NO: 275834 - DNA, 25 bp, Probe sequence
ttcgaaaatcgaacgtccagaagtt

SEQ ID NO: 275835 - DNA, 25 bp, Probe sequence
ttcccagaacaactaactaattatt

SEQ ID NO: 275836 - DNA, 25 bp, Probe sequence
atttaagtaacttttctgtatctga

SEQ ID NO: 275837 - DNA, 25 bp, Probe sequence
atccttcaacaattctattgatgca

SEQ ID NO: 275838 - DNA, 25 bp, Probe sequence
atgacactgattatattaagactaa

SEQ ID NO: 275839 - DNA, 25 bp, Probe sequence
agtacatacgcttaataaacgacgt

SEQ ID NO: 275840 - DNA, 25 bp, Probe sequence
agaactaccacaaagtattcaaagt

SEQ ID NO: 275841 - DNA, 25 bp, Probe sequence
agccaaaacatccttcaacaattct

SEQ ID NO: 275842 - DNA, 25 bp, Probe sequence
accgttgaagcaatgcaagggtact

SEQ ID NO: 275843 - DNA, 25 bp, Probe sequence
actgaaagattttatcaactgccta

SEQ ID NO: 275844 - DNA, 25 bp, Probe sequence
acaattctattgatgcatattattt

SEQ ID NO: 275845 - DNA, 25 bp, Probe sequence
aacctaattatgacattgaagccag

SEQ ID NO: 275846 - DNA, 25 bp, Probe sequence
aagatcgttttgaattatccctcca

SEQ ID NO: 275847 - DNA, 25 bp, Probe sequence
aagtaacttttctgtatctgaaatt

SEQ ID NO: 275848 - DNA, 25 bp, Probe sequence
aatcactactattcaaaattcaatg

SEQ ID NO: 275849 - DNA, 25 bp, Probe sequence
caaaacatccttcaacaattctatt

SEQ ID NO: 275850 - DNA, 25 bp, Probe sequence
cattcaaatcactactattcaaaat

SEQ ID NO: 275851 - DNA, 25 bp, Probe sequence
gccagtcatatcaaggaacttccaa

SEQ ID NO: 275852 - DNA, 25 bp, Probe sequence
gcgttttaaagctacattaattcaa

SEQ ID NO: 275853 - DNA, 25 bp, Probe sequence
gcaagggtacttaatgaaatctctt

SEQ ID NO: 275854 - DNA, 25 bp, Probe sequence
gaatttgcagaagtacatacgctta

SEQ ID NO: 275855 - DNA, 25 bp, Probe sequence
gaaatctcttaaatctgaatttgca

SEQ ID NO: 275856 - DNA, 25 bp, Probe sequence
gaaattgttaatgttcttaagcgtt

SEQ ID NO: 275857 - DNA, 25 bp, Probe sequence
gacattgaagccagtcatatcaagg

SEQ ID NO: 275858 - DNA, 25 bp, Probe sequence
gatcgttttgaattatccctccaaa

SEQ ID NO: 275859 - DNA, 25 bp, Probe sequence
gatactgattataatgacactgatt

SEQ ID NO: 275860 - DNA, 25 bp, Probe sequence
gttcttaagcgttttaaagctacat

SEQ ID NO: 275861 - DNA, 25 bp, Probe sequence
gttttgaattatccctccaaaatga

SEQ ID NO: 275862 - DNA, 25 bp, Probe sequence
gtgtgaatacttaggttatgcagaa

SEQ ID NO: 275863 - DNA, 25 bp, Probe sequence
tctagtaatcatacaaatcattcaa

SEQ ID NO: 275864 - DNA, 25 bp, Probe sequence
tcaattacttgaagaactaccacaa

SEQ ID NO: 275865 - DNA, 25 bp, Probe sequence
taaatctgtgttattaaaagccaaa

SEQ ID NO: 275866 - DNA, 25 bp, Probe sequence
tactaactcaagaacgtgttggcct

SEQ ID NO: 275867 - DNA, 25 bp, Probe sequence
tagattatacctattaaaacctaat

SEQ ID NO: 275868 - DNA, 25 bp, Probe sequence
ttatcaactgcctaaatatttattt

SEQ ID NO: 275869 - DNA, 25 bp, Probe sequence
ttaacatattctagtaatcatacaa

SEQ ID NO: 275870 - DNA, 25 bp, Probe sequence
agttccaagtactcgaagaattgcc

SEQ ID NO: 275871 - DNA, 25 bp, Probe sequence
atttgtgcgagtacttaggttatgg

SEQ ID NO: 275872 - DNA, 25 bp, Probe sequence
atatttgttcgaagatgcatatttt

SEQ ID NO: 275873 - DNA, 25 bp, Probe sequence
ataataatcatcattcgaatcatac

SEQ ID NO: 275874 - DNA, 25 bp, Probe sequence
atcgtttcgaattatccatccaaaa

SEQ ID NO: 275875 - DNA, 25 bp, Probe sequence
atgcccaattttgagaaatacaatt

SEQ ID NO: 275876 - DNA, 25 bp, Probe sequence
agtactcgaagaattgccacaacaa

SEQ ID NO: 275877 - DNA, 25 bp, Probe sequence
agatcgtttcgaattatccatccaa

SEQ ID NO: 275878 - DNA, 25 bp, Probe sequence
agaagatgttgagtttgaaattgta

SEQ ID NO: 275879 - DNA, 25 bp, Probe sequence
accgttgaagctatgcaaggttatt

SEQ ID NO: 275880 - DNA, 25 bp, Probe sequence
acaacaatttcaagactatttaagt

SEQ ID NO: 275881 - DNA, 25 bp, Probe sequence
aaacatttgtgcgagtacttaggtt

SEQ ID NO: 275882 - DNA, 25 bp, Probe sequence
aaaagtcatttaatacttcacatga

SEQ ID NO: 275883 - DNA, 25 bp, Probe sequence
aagcgatgttgctacaaaagaatga

SEQ ID NO: 275884 - DNA, 25 bp, Probe sequence
aatacttcacatgatacttattatc

SEQ ID NO: 275885 - DNA, 25 bp, Probe sequence
gcccttaagttccaagtactcgaag

SEQ ID NO: 275886 - DNA, 25 bp, Probe sequence
gcaagtcttaccaaggaacttccaa

SEQ ID NO: 275887 - DNA, 25 bp, Probe sequence
gcaaggttatttaatgcaatccatt

SEQ ID NO: 275888 - DNA, 25 bp, Probe sequence
gaaattgtaagtgtattgaaacgtt

SEQ ID NO: 275889 - DNA, 25 bp, Probe sequence
gagaaattcggattattaaaagcgt

SEQ ID NO: 275890 - DNA, 25 bp, Probe sequence
gaggataatgatacgtatgatatga

SEQ ID NO: 275891 - DNA, 25 bp, Probe sequence
gatacttattatcgtttagaagatg

SEQ ID NO: 275892 - DNA, 25 bp, Probe sequence
gatattgaagcaagtcttaccaagg

SEQ ID NO: 275893 - DNA, 25 bp, Probe sequence
gtttcgaattatccatccaaaatga

SEQ ID NO: 275894 - DNA, 25 bp, Probe sequence
gtgcgagtacttaggttatggagaa

SEQ ID NO: 275895 - DNA, 25 bp, Probe sequence
ggattattaaaagcgtattactcaa

SEQ ID NO: 275896 - DNA, 25 bp, Probe sequence
tgacgcccttaagttccaagtactc

SEQ ID NO: 275897 - DNA, 25 bp, Probe sequence
tgccacaacaatttcaagactattt

SEQ ID NO: 275898 - DNA, 25 bp, Probe sequence
tcctaaatatttgttcgaagatgca

SEQ ID NO: 275899 - DNA, 25 bp, Probe sequence
taatgacgcccttaagttccaagta

SEQ ID NO: 275900 - DNA, 25 bp, Probe sequence
taataatgacgcccttaagttccaa

SEQ ID NO: 275901 - DNA, 25 bp, Probe sequence
taccaacttcctaaatatttgttcg

SEQ ID NO: 275902 - DNA, 25 bp, Probe sequence
tattaactcaagagcgtgttggcct

SEQ ID NO: 275903 - DNA, 25 bp, Probe sequence
ttgaaacgttttaaagcgatgttgc

SEQ ID NO: 275904 - DNA, 25 bp, Probe sequence
atatttttatttctccttctgcaaa

SEQ ID NO: 275905 - DNA, 25 bp, Probe sequence
atagcaactcttttaacactttacg

SEQ ID NO: 275906 - DNA, 25 bp, Probe sequence
acttgaccaatatgtgaactacttt

SEQ ID NO: 275907 - DNA, 25 bp, Probe sequence
acatctccggttatggttagaacga

SEQ ID NO: 275908 - DNA, 25 bp, Probe sequence
aatgtaatagcaactcttttaacac

SEQ ID NO: 275909 - DNA, 25 bp, Probe sequence
aatagtgtattcaatgaatcgctca

SEQ ID NO: 275910 - DNA, 25 bp, Probe sequence
caatcatatttttatttctccttct

SEQ ID NO: 275911 - DNA, 25 bp, Probe sequence
gctcaatcatatttttatttctcct

SEQ ID NO: 275912 - DNA, 25 bp, Probe sequence
gctatcggagtaacatctccggtta

SEQ ID NO: 275913 - DNA, 25 bp, Probe sequence
gaatcgctcaatcatatttttattt

SEQ ID NO: 275914 - DNA, 25 bp, Probe sequence
gaacgatacttgaccaatatgtgaa

SEQ ID NO: 275915 - DNA, 25 bp, Probe sequence
gaccaatatgtgaactactttatgt

SEQ ID NO: 275916 - DNA, 25 bp, Probe sequence
gttagaacgatacttgaccaatatg

SEQ ID NO: 275917 - DNA, 25 bp, Probe sequence
gtattcaatgaatcgctcaatcata

SEQ ID NO: 275918 - DNA, 25 bp, Probe sequence
gtaacatctccggttatggttagaa

SEQ ID NO: 275919 - DNA, 25 bp, Probe sequence
gtaatagcaactcttttaacacttt

SEQ ID NO: 275920 - DNA, 25 bp, Probe sequence
ggttctgctatcggagtaacatctc

SEQ ID NO: 275921 - DNA, 25 bp, Probe sequence
ggagtaacatctccggttatggtta

SEQ ID NO: 275922 - DNA, 25 bp, Probe sequence
tgtcggttctgctatcggagtaaca

SEQ ID NO: 275923 - DNA, 25 bp, Probe sequence
tcggttctgctatcggagtaacatc

SEQ ID NO: 275924 - DNA, 25 bp, Probe sequence
tcttttaacactttacgtaattgct

SEQ ID NO: 275925 - DNA, 25 bp, Probe sequence
tctccggttatggttagaacgatac

SEQ ID NO: 275926 - DNA, 25 bp, Probe sequence
tctgtcggttctgctatcggagtaa

SEQ ID NO: 275927 - DNA, 25 bp, Probe sequence
tcatatttttatttctccttctgca

SEQ ID NO: 275928 - DNA, 25 bp, Probe sequence
taattacttagatgacgagaactga

SEQ ID NO: 275929 - DNA, 25 bp, Probe sequence
taacactttacgtaattgctaatta

SEQ ID NO: 275930 - DNA, 25 bp, Probe sequence
tagcaactcttttaacactttacgt

SEQ ID NO: 275931 - DNA, 25 bp, Probe sequence
tatgtgaactactttatgtttttta

SEQ ID NO: 275932 - DNA, 25 bp, Probe sequence
tatttctccttctgcaaaatttata

SEQ ID NO: 275933 - DNA, 25 bp, Probe sequence
tttatttctccttctgcaaaattta

SEQ ID NO: 275934 - DNA, 25 bp, Probe sequence
tttttatttctccttctgcaaaatt

SEQ ID NO: 275935 - DNA, 25 bp, Probe sequence
ttatgaataatataaatctcactca

SEQ ID NO: 275936 - DNA, 25 bp, Probe sequence
ttctgtcggttctgctatcggagta

SEQ ID NO: 275937 - DNA, 25 bp, Probe sequence
ttctccttctgcaaaatttataaaa

SEQ ID NO: 275938 - DNA, 25 bp, Probe sequence
attacttcttttcaactgcggtaat

SEQ ID NO: 275939 - DNA, 25 bp, Probe sequence
atattctataaatctatcaatcaat

SEQ ID NO: 275940 - DNA, 25 bp, Probe sequence
atatgtttgtcaggactgctaatga

SEQ ID NO: 275941 - DNA, 25 bp, Probe sequence
agctgtatgctatgtcgcttcgtgt

SEQ ID NO: 275942 - DNA, 25 bp, Probe sequence
acgtgaattacttcttttcaactgc

SEQ ID NO: 275943 - DNA, 25 bp, Probe sequence
acttcttttcaactgcggtaatagc

SEQ ID NO: 275944 - DNA, 25 bp, Probe sequence
aactgttgctaaaagtgttgctgtt

SEQ ID NO: 275945 - DNA, 25 bp, Probe sequence
aagtgttgctgttaatatgtttgtc

SEQ ID NO: 275946 - DNA, 25 bp, Probe sequence
aatcaatattttttggctccttcct

SEQ ID NO: 275947 - DNA, 25 bp, Probe sequence
caatcaatattttttggctccttcc

SEQ ID NO: 275948 - DNA, 25 bp, Probe sequence
cacgatgtttcattaactgttgcta

SEQ ID NO: 275949 - DNA, 25 bp, Probe sequence
cttcgtgtcttgctaatgcttttga

SEQ ID NO: 275950 - DNA, 25 bp, Probe sequence
cgcttcgtgtcttgctaatgctttt

SEQ ID NO: 275951 - DNA, 25 bp, Probe sequence
ccttcctcatcgtttgttcacgatg

SEQ ID NO: 275952 - DNA, 25 bp, Probe sequence
gcttcgtgtcttgctaatgcttttg

SEQ ID NO: 275953 - DNA, 25 bp, Probe sequence
gaattacttcttttcaactgcggta

SEQ ID NO: 275954 - DNA, 25 bp, Probe sequence
gatgtttcattaactgttgctaaaa

SEQ ID NO: 275955 - DNA, 25 bp, Probe sequence
gatgattacgtgaattacttctttt

SEQ ID NO: 275956 - DNA, 25 bp, Probe sequence
gatgacgtaaataccaaagaaagtg

SEQ ID NO: 275957 - DNA, 25 bp, Probe sequence
gattacgtgaattacttcttttcaa

SEQ ID NO: 275958 - DNA, 25 bp, Probe sequence
gttcacgatgtttcattaactgttg

SEQ ID NO: 275959 - DNA, 25 bp, Probe sequence
gtttgttcacgatgtttcattaact

SEQ ID NO: 275960 - DNA, 25 bp, Probe sequence
gtttgtcaggactgctaatgatgat

SEQ ID NO: 275961 - DNA, 25 bp, Probe sequence
gtcaggactgctaatgatgattacg

SEQ ID NO: 275962 - DNA, 25 bp, Probe sequence
gtcttgctaatgcttttgatttaaa

SEQ ID NO: 275963 - DNA, 25 bp, Probe sequence
gtgaattacttcttttcaactgcgg

SEQ ID NO: 275964 - DNA, 25 bp, Probe sequence
gtgtcttgctaatgcttttgattta

SEQ ID NO: 275965 - DNA, 25 bp, Probe sequence
ggactgctaatgatgattacgtgaa

SEQ ID NO: 275966 - DNA, 25 bp, Probe sequence
tgttaatatgtttgtcaggactgct

SEQ ID NO: 275967 - DNA, 25 bp, Probe sequence
tcctcatcgtttgttcacgatgttt

SEQ ID NO: 275968 - DNA, 25 bp, Probe sequence
tcttttcaactgcggtaatagctgt

SEQ ID NO: 275969 - DNA, 25 bp, Probe sequence
tcgtgtcttgctaatgcttttgatt

SEQ ID NO: 275970 - DNA, 25 bp, Probe sequence
tcaactgcggtaatagctgtatgct

SEQ ID NO: 275971 - DNA, 25 bp, Probe sequence
tagctgtatgctatgtcgcttcgtg

SEQ ID NO: 275972 - DNA, 25 bp, Probe sequence
ataaagcagttgagcgtattgaaaa

SEQ ID NO: 275973 - DNA, 25 bp, Probe sequence
atgcattatggcgttgttccaataa

SEQ ID NO: 275974 - DNA, 25 bp, Probe sequence
atgcaaagccacttaaagagaatat

SEQ ID NO: 275975 - DNA, 25 bp, Probe sequence
atgcaacagttcacatggacgaaaa

SEQ ID NO: 275976 - DNA, 25 bp, Probe sequence
agttttttgaatatgctaaagagtt

SEQ ID NO: 275977 - DNA, 25 bp, Probe sequence
agacgcgattaaacacattgatggt

SEQ ID NO: 275978 - DNA, 25 bp, Probe sequence
agacaagtaacaaatgctaaacatg

SEQ ID NO: 275979 - DNA, 25 bp, Probe sequence
agcaagaatatgaacgtgagagcca

SEQ ID NO: 275980 - DNA, 25 bp, Probe sequence
agctgctcaagatatttcggaagat

SEQ ID NO: 275981 - DNA, 25 bp, Probe sequence
aaatggtttagcaggaaacttagat

SEQ ID NO: 275982 - DNA, 25 bp, Probe sequence
aaaagctttaacagcgtttcaagat

SEQ ID NO: 275983 - DNA, 25 bp, Probe sequence
aaaacgagatagaggtatgcactta

SEQ ID NO: 275984 - DNA, 25 bp, Probe sequence
aacgggcatacaaaaacatgttcaa

SEQ ID NO: 275985 - DNA, 25 bp, Probe sequence
aagtctggtagagccttagatgata

SEQ ID NO: 275986 - DNA, 25 bp, Probe sequence
cgagtatataaagtctggtagagcc

SEQ ID NO: 275987 - DNA, 25 bp, Probe sequence
gcagacgataattttaaccaacttt

SEQ ID NO: 275988 - DNA, 25 bp, Probe sequence
gaatccagaattatattcagaacag

SEQ ID NO: 275989 - DNA, 25 bp, Probe sequence
gaacaggaacagcaacaagaacaac

SEQ ID NO: 275990 - DNA, 25 bp, Probe sequence
gagcgtattgaaaacgcagacgata

SEQ ID NO: 275991 - DNA, 25 bp, Probe sequence
gatatttcggaagattacgagtata

SEQ ID NO: 275992 - DNA, 25 bp, Probe sequence
gatttggtaaatgctaataaacaga

SEQ ID NO: 275993 - DNA, 25 bp, Probe sequence
gatttctttgataatcaaacgccag

SEQ ID NO: 275994 - DNA, 25 bp, Probe sequence
ggaacaaatacaacgggcatacaaa

SEQ ID NO: 275995 - DNA, 25 bp, Probe sequence
ggaacagcaacaagaacaacaaaag

SEQ ID NO: 275996 - DNA, 25 bp, Probe sequence
tgagcatgttaaacaacgaggatat

SEQ ID NO: 275997 - DNA, 25 bp, Probe sequence
taaaagctgctcaagatatttcgga

SEQ ID NO: 275998 - DNA, 25 bp, Probe sequence
tacatcagacaatgatttctttgat

SEQ ID NO: 275999 - DNA, 25 bp, Probe sequence
tagaacagacgcgattaaacacatt

SEQ ID NO: 276000 - DNA, 25 bp, Probe sequence
taggaagaaatacctttgcggaaag

SEQ ID NO: 276001 - DNA, 25 bp, Probe sequence
ttaatgcaagagtaccaaaaatcgt

SEQ ID NO: 276002 - DNA, 25 bp, Probe sequence
tttacgaaaatgcaaagccacttaa

SEQ ID NO: 276003 - DNA, 25 bp, Probe sequence
tttaacagcgtttcaagatagattt

SEQ ID NO: 276004 - DNA, 25 bp, Probe sequence
ttatatgcaacagttcacatggacg

SEQ ID NO: 276005 - DNA, 25 bp, Probe sequence
ttatggcgttgttccaataactgat

SEQ ID NO: 276006 - DNA, 25 bp, Probe sequence
ataactttaatgaacgatgttacta

SEQ ID NO: 276007 - DNA, 25 bp, Probe sequence
agacaagttacaaatgcaaagcatg

SEQ ID NO: 276008 - DNA, 25 bp, Probe sequence
agccattggcagaaaatcatatata

SEQ ID NO: 276009 - DNA, 25 bp, Probe sequence
agccaagaagattttgatgcctttc

SEQ ID NO: 276010 - DNA, 25 bp, Probe sequence
acatatgcattatggtgtcgttcca

SEQ ID NO: 276011 - DNA, 25 bp, Probe sequence
aaaagtcttaacagagtttcaggat

SEQ ID NO: 276012 - DNA, 25 bp, Probe sequence
aaacacatttaaattatgctttagt

SEQ ID NO: 276013 - DNA, 25 bp, Probe sequence
aacaggtattcaaaaacatgttcaa

SEQ ID NO: 276014 - DNA, 25 bp, Probe sequence
aacatattgatggcttgataacgtc

SEQ ID NO: 276015 - DNA, 25 bp, Probe sequence
aacgtcagatagtgagttttttgat

SEQ ID NO: 276016 - DNA, 25 bp, Probe sequence
aagggggatagataagcagataaat

SEQ ID NO: 276017 - DNA, 25 bp, Probe sequence
gcaagagtatcaaaaatcattaaat

SEQ ID NO: 276018 - DNA, 25 bp, Probe sequence
gaatatgttaatcaacgtggttatg

SEQ ID NO: 276019 - DNA, 25 bp, Probe sequence
gaagattttgatgcctttcagaagc

SEQ ID NO: 276020 - DNA, 25 bp, Probe sequence
gaagcaaatagaagcagcacaattg

SEQ ID NO: 276021 - DNA, 25 bp, Probe sequence
gaagcagcacaattggtaacagaag

SEQ ID NO: 276022 - DNA, 25 bp, Probe sequence
gaacagcaaaagcaacttaacgaag

SEQ ID NO: 276023 - DNA, 25 bp, Probe sequence
gaacagacgcagttaaacatattga

SEQ ID NO: 276024 - DNA, 25 bp, Probe sequence
gaaactcgaacaagccattggcaga

SEQ ID NO: 276025 - DNA, 25 bp, Probe sequence
gaaagacgtattaagggggatagat

SEQ ID NO: 276026 - DNA, 25 bp, Probe sequence
gaaatttatctgagaatcttgaaca

SEQ ID NO: 276027 - DNA, 25 bp, Probe sequence
gagtttcaggatagatttaacgaat

SEQ ID NO: 276028 - DNA, 25 bp, Probe sequence
gatggcttgataacgtcagatagtg

SEQ ID NO: 276029 - DNA, 25 bp, Probe sequence
gttttttgataatcaaactccagaa

SEQ ID NO: 276030 - DNA, 25 bp, Probe sequence
gttatgatctggaacgtgggcaatc

SEQ ID NO: 276031 - DNA, 25 bp, Probe sequence
gtggttatgatctggaacgtgggca

SEQ ID NO: 276032 - DNA, 25 bp, Probe sequence
tgatgcctttcagaagcaaatagaa

SEQ ID NO: 276033 - DNA, 25 bp, Probe sequence
tgcattatggtgtcgttccaataac

SEQ ID NO: 276034 - DNA, 25 bp, Probe sequence
taagaaactcgaacaagccattggc

SEQ ID NO: 276035 - DNA, 25 bp, Probe sequence
tcagaaaaagctttaaatgacctta

SEQ ID NO: 276036 - DNA, 25 bp, Probe sequence
taatttgctatatgcaacggtgcat

SEQ ID NO: 276037 - DNA, 25 bp, Probe sequence
taaacaagaatatgagcgtgagagc

SEQ ID NO: 276038 - DNA, 25 bp, Probe sequence
taaatccagaaaactatcaagaaca

SEQ ID NO: 276039 - DNA, 25 bp, Probe sequence
ttatggtgtcgttccaataactgat

SEQ ID NO: 276040 - DNA, 25 bp, Probe sequence
atacgtatattaataagcaaggcta

SEQ ID NO: 276041 - DNA, 25 bp, Probe sequence
atcagataatgtgtttttaatcaat

SEQ ID NO: 276042 - DNA, 25 bp, Probe sequence
atgcgacagtacatatggatgagat

SEQ ID NO: 276043 - DNA, 25 bp, Probe sequence
atgtcttattcaattattcgagttg

SEQ ID NO: 276044 - DNA, 25 bp, Probe sequence
atgtgtttttaatcaattatctgaa

SEQ ID NO: 276045 - DNA, 25 bp, Probe sequence
agcgttcttggaagaagaatacggt

SEQ ID NO: 276046 - DNA, 25 bp, Probe sequence
acgcaaaattagaacagatgccatt

SEQ ID NO: 276047 - DNA, 25 bp, Probe sequence
acgaggaatttctagacaacttaca

SEQ ID NO: 276048 - DNA, 25 bp, Probe sequence
acagatgccattaaacatattgatg

SEQ ID NO: 276049 - DNA, 25 bp, Probe sequence
acaagaggtattcaaagacatattc

SEQ ID NO: 276050 - DNA, 25 bp, Probe sequence
aaatcttttatatgcgacagtacat

SEQ ID NO: 276051 - DNA, 25 bp, Probe sequence
aaagatggacgtttaagtgcgaaag

SEQ ID NO: 276052 - DNA, 25 bp, Probe sequence
aaaagcattaaccgaattccaagat

SEQ ID NO: 276053 - DNA, 25 bp, Probe sequence
aagcatgctaaagcgttcttggaag

SEQ ID NO: 276054 - DNA, 25 bp, Probe sequence
aattccaagatagattcaatacgta

SEQ ID NO: 276055 - DNA, 25 bp, Probe sequence
caagatagattcaatacgtatatta

SEQ ID NO: 276056 - DNA, 25 bp, Probe sequence
gcattaaccgaattccaagatagat

SEQ ID NO: 276057 - DNA, 25 bp, Probe sequence
gcatgctaaagcgttcttggaagaa

SEQ ID NO: 276058 - DNA, 25 bp, Probe sequence
gacgtttaagtgcgaaagaagttgt

SEQ ID NO: 276059 - DNA, 25 bp, Probe sequence
gcaaggctatgatttaaaacgagga

SEQ ID NO: 276060 - DNA, 25 bp, Probe sequence
gaagcaaatagaggatcatttaaag

SEQ ID NO: 276061 - DNA, 25 bp, Probe sequence
gaacagatgccattaaacatattga

SEQ ID NO: 276062 - DNA, 25 bp, Probe sequence
gaaaatcttttatatgcgacagtac

SEQ ID NO: 276063 - DNA, 25 bp, Probe sequence
gacaaaatagttttttaagcatgct

SEQ ID NO: 276064 - DNA, 25 bp, Probe sequence
gatggacgtttaagtgcgaaagaag

SEQ ID NO: 276065 - DNA, 25 bp, Probe sequence
gaggtattcaaagacatattcaaag

SEQ ID NO: 276066 - DNA, 25 bp, Probe sequence
gatggattaattacatcagataatg

SEQ ID NO: 276067 - DNA, 25 bp, Probe sequence
gtcaatgatactaagtttgatttta

SEQ ID NO: 276068 - DNA, 25 bp, Probe sequence
gtcttattcaattattcgagttgtt

SEQ ID NO: 276069 - DNA, 25 bp, Probe sequence
ggaatttctagacaacttacaaaag

SEQ ID NO: 276070 - DNA, 25 bp, Probe sequence
tggatgagataacaccacatatgca

SEQ ID NO: 276071 - DNA, 25 bp, Probe sequence
tcaattattcgagttgttaaagtga

SEQ ID NO: 276072 - DNA, 25 bp, Probe sequence
ttaagcatgctaaagcgttcttgga

SEQ ID NO: 276073 - DNA, 25 bp, Probe sequence
ttcctattactaaagatggacgttt

SEQ ID NO: 276074 - DNA, 25 bp, Probe sequence
atcattcgttgattaaccatattga

SEQ ID NO: 276075 - DNA, 25 bp, Probe sequence
atgaatttgatttattgcaggaaca

SEQ ID NO: 276076 - DNA, 25 bp, Probe sequence
atgatagtccgattgattataatca

SEQ ID NO: 276077 - DNA, 25 bp, Probe sequence
atgtcccatatgagcttgaaattga

SEQ ID NO: 276078 - DNA, 25 bp, Probe sequence
aggcatgaaccagaaattatttttg

SEQ ID NO: 276079 - DNA, 25 bp, Probe sequence
agaagatggtcgattgagtgcaaaa

SEQ ID NO: 276080 - DNA, 25 bp, Probe sequence
acgagatgatggctacactttataa

SEQ ID NO: 276081 - DNA, 25 bp, Probe sequence
acaccgagacgacatgagcagataa

SEQ ID NO: 276082 - DNA, 25 bp, Probe sequence
acaagtaaaagcttctcaactcatt

SEQ ID NO: 276083 - DNA, 25 bp, Probe sequence
aaagttggtggactgttcaacaaag

SEQ ID NO: 276084 - DNA, 25 bp, Probe sequence
aaacacctcatatgcattatggggt

SEQ ID NO: 276085 - DNA, 25 bp, Probe sequence
aaaaggcactaactgaatttcaaga

SEQ ID NO: 276086 - DNA, 25 bp, Probe sequence
aacgaacatatcaatagttgtggtt

SEQ ID NO: 276087 - DNA, 25 bp, Probe sequence
aagcctataaatgtcccatatgagc

SEQ ID NO: 276088 - DNA, 25 bp, Probe sequence
aagcttctcaactcattactgatga

SEQ ID NO: 276089 - DNA, 25 bp, Probe sequence
aagaagaaacatatcattcgttgat

SEQ ID NO: 276090 - DNA, 25 bp, Probe sequence
aatggaacagtatcaaaatgcttta

SEQ ID NO: 276091 - DNA, 25 bp, Probe sequence
aatacaatgatttagcggatagtta

SEQ ID NO: 276092 - DNA, 25 bp, Probe sequence
gcattatggggtagttccgattaca

SEQ ID NO: 276093 - DNA, 25 bp, Probe sequence
gaatatgagcatgagagccgaaaat

SEQ ID NO: 276094 - DNA, 25 bp, Probe sequence
gaaacacaggaaacaggtaacgtcg

SEQ ID NO: 276095 - DNA, 25 bp, Probe sequence
gacatgagcagataagtcgttataa

SEQ ID NO: 276096 - DNA, 25 bp, Probe sequence
gagagccgaaaattagaccgtataa

SEQ ID NO: 276097 - DNA, 25 bp, Probe sequence
gatgaacgagatgatggctacactt

SEQ ID NO: 276098 - DNA, 25 bp, Probe sequence
gatgataacgatgaacaattcttta

SEQ ID NO: 276099 - DNA, 25 bp, Probe sequence
gatagattattagacgaacagatta

SEQ ID NO: 276100 - DNA, 25 bp, Probe sequence
gttgtggttatgacttgagtagagg

SEQ ID NO: 276101 - DNA, 25 bp, Probe sequence
gtatcaaaatgctttagatgttcta

SEQ ID NO: 276102 - DNA, 25 bp, Probe sequence
gtagttccgattacagaagatggtc

SEQ ID NO: 276103 - DNA, 25 bp, Probe sequence
ggcgttacaccgagacgacatgagc

SEQ ID NO: 276104 - DNA, 25 bp, Probe sequence
ggcgtattctattatcagagttgct

SEQ ID NO: 276105 - DNA, 25 bp, Probe sequence
tgataatcacttagaaagctcaaaa

SEQ ID NO: 276106 - DNA, 25 bp, Probe sequence
taacaaggggcgttacaccgagacg

SEQ ID NO: 276107 - DNA, 25 bp, Probe sequence
ttacatctggtaatgaattttctaa

SEQ ID NO: 276108 - DNA, 25 bp, Probe sequence
attgagcccaaaataatcatacgaa

SEQ ID NO: 276109 - DNA, 25 bp, Probe sequence
attacagaaataactagctcaaagc

SEQ ID NO: 276110 - DNA, 25 bp, Probe sequence
ataactagctcaaagcgttatggaa

SEQ ID NO: 276111 - DNA, 25 bp, Probe sequence
agcgttatggaattgagcccaaaat

SEQ ID NO: 276112 - DNA, 25 bp, Probe sequence
atggaattgagcccaaaataatcat

SEQ ID NO: 276113 - DNA, 25 bp, Probe sequence
accaaattacagaaataactagctc

SEQ ID NO: 276114 - DNA, 25 bp, Probe sequence
agcccaaaataatcatacgaataga

SEQ ID NO: 276115 - DNA, 25 bp, Probe sequence
actagctcaaagcgttatggaattg

SEQ ID NO: 276116 - DNA, 25 bp, Probe sequence
acagaaataactagctcaaagcgtt

SEQ ID NO: 276117 - DNA, 25 bp, Probe sequence
aaattacagaaataactagctcaaa

SEQ ID NO: 276118 - DNA, 25 bp, Probe sequence
aaagcgttatggaattgagcccaaa

SEQ ID NO: 276119 - DNA, 25 bp, Probe sequence
aactagctcaaagcgttatggaatt

SEQ ID NO: 276120 - DNA, 25 bp, Probe sequence
aagcgttatggaattgagcccaaaa

SEQ ID NO: 276121 - DNA, 25 bp, Probe sequence
aagacgataaccaaattacagaaat

SEQ ID NO: 276122 - DNA, 25 bp, Probe sequence
aataactagctcaaagcgttatgga

SEQ ID NO: 276123 - DNA, 25 bp, Probe sequence
aattgagcccaaaataatcatacga

SEQ ID NO: 276124 - DNA, 25 bp, Probe sequence
caaagcgttatggaattgagcccaa

SEQ ID NO: 276125 - DNA, 25 bp, Probe sequence
cagaaataactagctcaaagcgtta

SEQ ID NO: 276126 - DNA, 25 bp, Probe sequence
ctagctcaaagcgttatggaattga

SEQ ID NO: 276127 - DNA, 25 bp, Probe sequence
cgttatggaattgagcccaaaataa

SEQ ID NO: 276128 - DNA, 25 bp, Probe sequence
gcccaaaataatcatacgaatagaa

SEQ ID NO: 276129 - DNA, 25 bp, Probe sequence
gcgttatggaattgagcccaaaata

SEQ ID NO: 276130 - DNA, 25 bp, Probe sequence
gaattgagcccaaaataatcatacg

SEQ ID NO: 276131 - DNA, 25 bp, Probe sequence
gaaagacgataaccaaattacagaa

SEQ ID NO: 276132 - DNA, 25 bp, Probe sequence
gaaataactagctcaaagcgttatg

SEQ ID NO: 276133 - DNA, 25 bp, Probe sequence
gacgataaccaaattacagaaataa

SEQ ID NO: 276134 - DNA, 25 bp, Probe sequence
gagcccaaaataatcatacgaatag

SEQ ID NO: 276135 - DNA, 25 bp, Probe sequence
gttatggaattgagcccaaaataat

SEQ ID NO: 276136 - DNA, 25 bp, Probe sequence
ggaaagacgataaccaaattacaga

SEQ ID NO: 276137 - DNA, 25 bp, Probe sequence
ggaattgagcccaaaataatcatac

SEQ ID NO: 276138 - DNA, 25 bp, Probe sequence
tcaaagcgttatggaattgagccca

SEQ ID NO: 276139 - DNA, 25 bp, Probe sequence
taactagctcaaagcgttatggaat

SEQ ID NO: 276140 - DNA, 25 bp, Probe sequence
tacagaaataactagctcaaagcgt

SEQ ID NO: 276141 - DNA, 25 bp, Probe sequence
ttgagcccaaaataatcatacgaat

SEQ ID NO: 276142 - DNA, 25 bp, Probe sequence
atatcagcctttgactttaattttc

SEQ ID NO: 276143 - DNA, 25 bp, Probe sequence
atatgaaaacatagtctttttagac

SEQ ID NO: 276144 - DNA, 25 bp, Probe sequence
agtacttactttattaagtgtcatc

SEQ ID NO: 276145 - DNA, 25 bp, Probe sequence
agattgaagcactatagcaagtata

SEQ ID NO: 276146 - DNA, 25 bp, Probe sequence
accgagcatcaatcaacaagatgtt

SEQ ID NO: 276147 - DNA, 25 bp, Probe sequence
actttattaagtgtcatcatttgaa

SEQ ID NO: 276148 - DNA, 25 bp, Probe sequence
aagctgccaaaatattcttccaaat

SEQ ID NO: 276149 - DNA, 25 bp, Probe sequence
aagaaatatcagcctttgactttaa

SEQ ID NO: 276150 - DNA, 25 bp, Probe sequence
aagtgtcatcatttgaaagagaatt

SEQ ID NO: 276151 - DNA, 25 bp, Probe sequence
aattttcaaccgagcatcaatcaac

SEQ ID NO: 276152 - DNA, 25 bp, Probe sequence
aatattcttccaaattaatagattt

SEQ ID NO: 276153 - DNA, 25 bp, Probe sequence
caagatgttttggattttacggatt

SEQ ID NO: 276154 - DNA, 25 bp, Probe sequence
cttacctattggaagtgaagctgcc

SEQ ID NO: 276155 - DNA, 25 bp, Probe sequence
gctgccaaaatattcttccaaatta

SEQ ID NO: 276156 - DNA, 25 bp, Probe sequence
gcaaaacttgagaacagcttagaaa

SEQ ID NO: 276157 - DNA, 25 bp, Probe sequence
gaagcactatagcaagtataagtta

SEQ ID NO: 276158 - DNA, 25 bp, Probe sequence
gaaatatcagcctttgactttaatt

SEQ ID NO: 276159 - DNA, 25 bp, Probe sequence
gactttaattttcaaccgagcatca

SEQ ID NO: 276160 - DNA, 25 bp, Probe sequence
gagaacagcttagaaaatagattga

SEQ ID NO: 276161 - DNA, 25 bp, Probe sequence
gatggtaaaggttatggcgttaccg

SEQ ID NO: 276162 - DNA, 25 bp, Probe sequence
gtctttttagactcaaatgtcgtta

SEQ ID NO: 276163 - DNA, 25 bp, Probe sequence
gtcattcatagacacattaattaaa

SEQ ID NO: 276164 - DNA, 25 bp, Probe sequence
gtgaagctgccaaaatattcttcca

SEQ ID NO: 276165 - DNA, 25 bp, Probe sequence
ggtacttacctattggaagtgaagc

SEQ ID NO: 276166 - DNA, 25 bp, Probe sequence
ggaagtgaagctgccaaaatattct

SEQ ID NO: 276167 - DNA, 25 bp, Probe sequence
tgccaaaatattcttccaaattaat

SEQ ID NO: 276168 - DNA, 25 bp, Probe sequence
ttgggtacttacctattggaagtga

SEQ ID NO: 276169 - DNA, 25 bp, Probe sequence
tcattgatgagattgggtacttacc

SEQ ID NO: 276170 - DNA, 25 bp, Probe sequence
tcagcctttgactttaattttcaac

SEQ ID NO: 276171 - DNA, 25 bp, Probe sequence
tagactcaaatgtcgttagtaaaaa

SEQ ID NO: 276172 - DNA, 25 bp, Probe sequence
tttaattttcaaccgagcatcaatc

SEQ ID NO: 276173 - DNA, 25 bp, Probe sequence
ttttagactcaaatgtcgttagtaa

SEQ ID NO: 276174 - DNA, 25 bp, Probe sequence
ttttcaaccgagcatcaatcaacaa

SEQ ID NO: 276175 - DNA, 25 bp, Probe sequence
ttcaaccgagcatcaatcaacaaga

SEQ ID NO: 276176 - DNA, 25 bp, Probe sequence
attcaagttgcagcggcagcaagtt

SEQ ID NO: 276177 - DNA, 25 bp, Probe sequence
attagcattaggtgaagtgaaaact

SEQ ID NO: 276178 - DNA, 25 bp, Probe sequence
atagtctagtattaattggtgataa

SEQ ID NO: 276179 - DNA, 25 bp, Probe sequence
atgtctgcaaatactaaagatgtag

SEQ ID NO: 276180 - DNA, 25 bp, Probe sequence
acctgttgacgtatttatgtctgca

SEQ ID NO: 276181 - DNA, 25 bp, Probe sequence
aaatatgcgaaaaatagtctagtat

SEQ ID NO: 276182 - DNA, 25 bp, Probe sequence
aaacaaattgaatcaggcgcacctg

SEQ ID NO: 276183 - DNA, 25 bp, Probe sequence
aacaaattgaatcaggcgcacctgt

SEQ ID NO: 276184 - DNA, 25 bp, Probe sequence
aagttgcagcggcagcaagtttaac

SEQ ID NO: 276185 - DNA, 25 bp, Probe sequence
aatcaggcgcacctgttgacgtatt

SEQ ID NO: 276186 - DNA, 25 bp, Probe sequence
aattgaatcaggcgcacctgttgac

SEQ ID NO: 276187 - DNA, 25 bp, Probe sequence
cagcggcagcaagtttaacagatgt

SEQ ID NO: 276188 - DNA, 25 bp, Probe sequence
gcgcacctgttgacgtatttatgtc

SEQ ID NO: 276189 - DNA, 25 bp, Probe sequence
gcacctgttgacgtatttatgtctg

SEQ ID NO: 276190 - DNA, 25 bp, Probe sequence
gcagcggcagcaagtttaacagatg

SEQ ID NO: 276191 - DNA, 25 bp, Probe sequence
gaatcaggcgcacctgttgacgtat

SEQ ID NO: 276192 - DNA, 25 bp, Probe sequence
gaagtgaaaactgtaccagcaggaa

SEQ ID NO: 276193 - DNA, 25 bp, Probe sequence
gacgtatttatgtctgcaaatacta

SEQ ID NO: 276194 - DNA, 25 bp, Probe sequence
gagtggatggaattcttaaaatcag

SEQ ID NO: 276195 - DNA, 25 bp, Probe sequence
gatgtagatgcattaaaagacaaga

SEQ ID NO: 276196 - DNA, 25 bp, Probe sequence
gttgcagcggcagcaagtttaacag

SEQ ID NO: 276197 - DNA, 25 bp, Probe sequence
gtaccagcaggaaaatatgcgaaac

SEQ ID NO: 276198 - DNA, 25 bp, Probe sequence
gtaaaatcgtttatgctaaagatgt

SEQ ID NO: 276199 - DNA, 25 bp, Probe sequence
gtgaaaactgtaccagcaggaaaat

SEQ ID NO: 276200 - DNA, 25 bp, Probe sequence
ggtgaagtgaaaactgtaccagcag

SEQ ID NO: 276201 - DNA, 25 bp, Probe sequence
ggatggaattcttaaaatcagataa

SEQ ID NO: 276202 - DNA, 25 bp, Probe sequence
tgttgacgtatttatgtctgcaaat

SEQ ID NO: 276203 - DNA, 25 bp, Probe sequence
tcaggcgcacctgttgacgtattta

SEQ ID NO: 276204 - DNA, 25 bp, Probe sequence
tcaagttgcagcggcagcaagttta

SEQ ID NO: 276205 - DNA, 25 bp, Probe sequence
taaagattcaaattacacttcagta

SEQ ID NO: 276206 - DNA, 25 bp, Probe sequence
tacacttcagtaaaagacttaaaag

SEQ ID NO: 276207 - DNA, 25 bp, Probe sequence
tatgcgaaacagtatttagataaca

SEQ ID NO: 276208 - DNA, 25 bp, Probe sequence
ttaaatttaactatggtggatcagg

SEQ ID NO: 276209 - DNA, 25 bp, Probe sequence
ttgaatcaggcgcacctgttgacgt

SEQ ID NO: 276210 - DNA, 25 bp, Probe sequence
atataatctttacaatttaacaatg

SEQ ID NO: 276211 - DNA, 25 bp, Probe sequence
atatgatccaacaaaacacaatttt

SEQ ID NO: 276212 - DNA, 25 bp, Probe sequence
ataaatatggagatcctatctataa

SEQ ID NO: 276213 - DNA, 25 bp, Probe sequence
agaccgaattctataacaaaatatg

SEQ ID NO: 276214 - DNA, 25 bp, Probe sequence
actgtttcagattattactattgga

SEQ ID NO: 276215 - DNA, 25 bp, Probe sequence
actctttgaaagatgcagtttatca

SEQ ID NO: 276216 - DNA, 25 bp, Probe sequence
aaataattgatagtttagaggcaca

SEQ ID NO: 276217 - DNA, 25 bp, Probe sequence
aagaacactaatatgcttactttcc

SEQ ID NO: 276218 - DNA, 25 bp, Probe sequence
aagggagctactgtttcagattatt

SEQ ID NO: 276219 - DNA, 25 bp, Probe sequence
aatgttgacttgaagcagtttgata

SEQ ID NO: 276220 - DNA, 25 bp, Probe sequence
aatttactggagcaatagacttatt

SEQ ID NO: 276221 - DNA, 25 bp, Probe sequence
cactaatatgcttactttccataaa

SEQ ID NO: 276222 - DNA, 25 bp, Probe sequence
cgatatttttaactctttgaaagat

SEQ ID NO: 276223 - DNA, 25 bp, Probe sequence
gcttactttccataaatataatctt

SEQ ID NO: 276224 - DNA, 25 bp, Probe sequence
gcataaaaatgttgacttgaagcag

SEQ ID NO: 276225 - DNA, 25 bp, Probe sequence
gcaactaaagaagtttatgaccttg

SEQ ID NO: 276226 - DNA, 25 bp, Probe sequence
gaagtttatgaccttgtttctgaaa

SEQ ID NO: 276227 - DNA, 25 bp, Probe sequence
gaagcagtttgataaagatggagaa

SEQ ID NO: 276228 - DNA, 25 bp, Probe sequence
gaagcgaaagatagattgatgacaa

SEQ ID NO: 276229 - DNA, 25 bp, Probe sequence
gaacactaatatgcttactttccat

SEQ ID NO: 276230 - DNA, 25 bp, Probe sequence
gaggcacaatttactggagcaatag

SEQ ID NO: 276231 - DNA, 25 bp, Probe sequence
gatggagaagacaaggcaactaaag

SEQ ID NO: 276232 - DNA, 25 bp, Probe sequence
gattgatgacaagagtattaggaga

SEQ ID NO: 276233 - DNA, 25 bp, Probe sequence
gattgatgaatatgagctttataaa

SEQ ID NO: 276234 - DNA, 25 bp, Probe sequence
gtttatgaccttgtttctgaaattg

SEQ ID NO: 276235 - DNA, 25 bp, Probe sequence
gtaaaaagggagctactgtttcaga

SEQ ID NO: 276236 - DNA, 25 bp, Probe sequence
ggagatcctatctataaagaagcga

SEQ ID NO: 276237 - DNA, 25 bp, Probe sequence
ggagctactgtttcagattattact

SEQ ID NO: 276238 - DNA, 25 bp, Probe sequence
ggcacaatttactggagcaatagac

SEQ ID NO: 276239 - DNA, 25 bp, Probe sequence
tgaccttgtttctgaaattgataca

SEQ ID NO: 276240 - DNA, 25 bp, Probe sequence
taggagaagaccagtatttattaaa

SEQ ID NO: 276241 - DNA, 25 bp, Probe sequence
tataacgatatttttaactctttga

SEQ ID NO: 276242 - DNA, 25 bp, Probe sequence
ttagttgtaacttattatgctgata

SEQ ID NO: 276243 - DNA, 25 bp, Probe sequence
ttagaggcacaatttactggagcaa

SEQ ID NO: 276244 - DNA, 25 bp, Probe sequence
agaaactaaaggtgcggtcgataag

SEQ ID NO: 276245 - DNA, 25 bp, Probe sequence
acaagaagttaaaactactgctggt

SEQ ID NO: 276246 - DNA, 25 bp, Probe sequence
aacaagaagttaaaactactgctgg

SEQ ID NO: 276247 - DNA, 25 bp, Probe sequence
aactaaaggtgcggtcgataaggca

SEQ ID NO: 276248 - DNA, 25 bp, Probe sequence
caacaagaagttaaaactactgctg

SEQ ID NO: 276249 - DNA, 25 bp, Probe sequence
caagaagttaaaactactgctggta

SEQ ID NO: 276250 - DNA, 25 bp, Probe sequence
ccaacaagaagttaaaactactgct

SEQ ID NO: 276251 - DNA, 25 bp, Probe sequence
gaaactaaaggtgcggtcgataagg

SEQ ID NO: 276252 - DNA, 25 bp, Probe sequence
gaagttaaaactactgctggtaaag

SEQ ID NO: 276253 - DNA, 25 bp, Probe sequence
gcaacgtaccctaacgataattcga

SEQ ID NO: 276254 - DNA, 25 bp, Probe sequence
attgggagaaaatagaagctttaga

SEQ ID NO: 276255 - DNA, 25 bp, Probe sequence
aggtgatgcgcaaaacccgaataga

SEQ ID NO: 276256 - DNA, 25 bp, Probe sequence
agagatgctgttgctaaggctgacg

SEQ ID NO: 276257 - DNA, 25 bp, Probe sequence
agatgctgttgctaaggctgacgaa

SEQ ID NO: 276258 - DNA, 25 bp, Probe sequence
agcaacgtaccctaacgataattcg

SEQ ID NO: 276259 - DNA, 25 bp, Probe sequence
acaagagatgctgttgctaaggctg

SEQ ID NO: 276260 - DNA, 25 bp, Probe sequence
aaaccagaatagaccttcaactata

SEQ ID NO: 276261 - DNA, 25 bp, Probe sequence
aacaaaccagaatagaccttcaact

SEQ ID NO: 276262 - DNA, 25 bp, Probe sequence
aatactaggtgatgcgcaaaacccg

SEQ ID NO: 276263 - DNA, 25 bp, Probe sequence
aagagatgctgttgctaaggctgac

SEQ ID NO: 276264 - DNA, 25 bp, Probe sequence
aatggagcgcttatagatagcagat

SEQ ID NO: 276265 - DNA, 25 bp, Probe sequence
aattgttgatgatttctttgtggaa

SEQ ID NO: 276266 - DNA, 25 bp, Probe sequence
ctaggtgatgcgcaaaacccgaata

SEQ ID NO: 276267 - DNA, 25 bp, Probe sequence
ccagaatagaccttcaactataaag

SEQ ID NO: 276268 - DNA, 25 bp, Probe sequence
gcgcaaaacccgaatagaataacta

SEQ ID NO: 276269 - DNA, 25 bp, Probe sequence
gctttagaaaagcagttctcaagtg

SEQ ID NO: 276270 - DNA, 25 bp, Probe sequence
gagagtaaaaatggagcgcttatag

SEQ ID NO: 276271 - DNA, 25 bp, Probe sequence
gagatgctgttgctaaggctgacga

SEQ ID NO: 276272 - DNA, 25 bp, Probe sequence
gatgctgttgctaaggctgacgaat

SEQ ID NO: 276273 - DNA, 25 bp, Probe sequence
gatgcgcaaaacccgaatagaataa

SEQ ID NO: 276274 - DNA, 25 bp, Probe sequence
gatataatactaggtgatgcgcaaa

SEQ ID NO: 276275 - DNA, 25 bp, Probe sequence
gatttctttgtggaaacaaaccaga

SEQ ID NO: 276276 - DNA, 25 bp, Probe sequence
gtataaagcaacgtaccctaacgat

SEQ ID NO: 276277 - DNA, 25 bp, Probe sequence
gtaccctaacgataattcgaaaatg

SEQ ID NO: 276278 - DNA, 25 bp, Probe sequence
gtgatgcgcaaaacccgaatagaat

SEQ ID NO: 276279 - DNA, 25 bp, Probe sequence
tggagcgcttatagatagcagatat

SEQ ID NO: 276280 - DNA, 25 bp, Probe sequence
tgaaatttccaattcattaaaagac

SEQ ID NO: 276281 - DNA, 25 bp, Probe sequence
tcataagtacaatgtttattattta

SEQ ID NO: 276282 - DNA, 25 bp, Probe sequence
tactaggtgatgcgcaaaacccgaa

SEQ ID NO: 276283 - DNA, 25 bp, Probe sequence
taaagcaacgtaccctaacgataat

SEQ ID NO: 276284 - DNA, 25 bp, Probe sequence
tagaccttcaactataaagaaatat

SEQ ID NO: 276285 - DNA, 25 bp, Probe sequence
tttgcagcgtattatggacatgaaa

SEQ ID NO: 276286 - DNA, 25 bp, Probe sequence
ttcaattgttgatgatttctttgtg

SEQ ID NO: 276287 - DNA, 25 bp, Probe sequence
agagaagcagttgaaaaagcagacg

SEQ ID NO: 276288 - DNA, 25 bp, Probe sequence
agaagcagttgaaaaagcagacgaa

SEQ ID NO: 276289 - DNA, 25 bp, Probe sequence
agcagttgaaaaagcagacgaatct

SEQ ID NO: 276290 - DNA, 25 bp, Probe sequence
gcagttgaaaaagcagacgaatctt

SEQ ID NO: 276291 - DNA, 25 bp, Probe sequence
gagaagcagttgaaaaagcagacga

SEQ ID NO: 276292 - DNA, 25 bp, Probe sequence
attaagtcctgtgaaattttatgat

SEQ ID NO: 276293 - DNA, 25 bp, Probe sequence
atatccatcagtctttaaaagatgc

SEQ ID NO: 276294 - DNA, 25 bp, Probe sequence
atgatatccatcagtctttaaaaga

SEQ ID NO: 276295 - DNA, 25 bp, Probe sequence
atgtatactctttagttagtgaaat

SEQ ID NO: 276296 - DNA, 25 bp, Probe sequence
agaccagcactaagcgataattata

SEQ ID NO: 276297 - DNA, 25 bp, Probe sequence
agctggattaagtcctgtgaaattt

SEQ ID NO: 276298 - DNA, 25 bp, Probe sequence
actgataatgtatactctttagtta

SEQ ID NO: 276299 - DNA, 25 bp, Probe sequence
actaggtgaggaccaatacttatta

SEQ ID NO: 276300 - DNA, 25 bp, Probe sequence
aaacagaccagcactaagcgataat

SEQ ID NO: 276301 - DNA, 25 bp, Probe sequence
aaaacagaccagcactaagcgataa

SEQ ID NO: 276302 - DNA, 25 bp, Probe sequence
aacaaaacagaccagcactaagcga

SEQ ID NO: 276303 - DNA, 25 bp, Probe sequence
aactgtcaaaacatacggtgaaact

SEQ ID NO: 276304 - DNA, 25 bp, Probe sequence
aatgactgatgatttgaattctatt

SEQ ID NO: 276305 - DNA, 25 bp, Probe sequence
gaatactaggtgaggaccaatactt

SEQ ID NO: 276306 - DNA, 25 bp, Probe sequence
aattgatactattgttgcaacatat

SEQ ID NO: 276307 - DNA, 25 bp, Probe sequence
caaaacatacggtgaaactgaaaca

SEQ ID NO: 276308 - DNA, 25 bp, Probe sequence
cagaccagcactaagcgataattat

SEQ ID NO: 276309 - DNA, 25 bp, Probe sequence
catacggtgaaactgaaacaaaagc

SEQ ID NO: 276310 - DNA, 25 bp, Probe sequence
gaacaaaacagaccagcactaagcg

SEQ ID NO: 276311 - DNA, 25 bp, Probe sequence
gaaactgataatgtatactctttag

SEQ ID NO: 276312 - DNA, 25 bp, Probe sequence
gaaattttatgattacaatctttat

SEQ ID NO: 276313 - DNA, 25 bp, Probe sequence
gatgcaaaagataaactaatgacta

SEQ ID NO: 276314 - DNA, 25 bp, Probe sequence
gatgcagtagaagagttctatcaag

SEQ ID NO: 276315 - DNA, 25 bp, Probe sequence
gataatgtatactctttagttagtg

SEQ ID NO: 276316 - DNA, 25 bp, Probe sequence
gataacaaagaaagcttcgataaat

SEQ ID NO: 276317 - DNA, 25 bp, Probe sequence
gataaactaatgactagaatactag

SEQ ID NO: 276318 - DNA, 25 bp, Probe sequence
gtgaaattgatactattgttgcaac

SEQ ID NO: 276319 - DNA, 25 bp, Probe sequence
ggattaagtcctgtgaaattttatg

SEQ ID NO: 276320 - DNA, 25 bp, Probe sequence
ggagataaaaatcatggagagcatg

SEQ ID NO: 276321 - DNA, 25 bp, Probe sequence
ggactcaaggtaaaattgtagaagg

SEQ ID NO: 276322 - DNA, 25 bp, Probe sequence
tggagagcatgctaaagagttgaga

SEQ ID NO: 276323 - DNA, 25 bp, Probe sequence
tgactgatgatttgaattctattat

SEQ ID NO: 276324 - DNA, 25 bp, Probe sequence
taatgatatccatcagtctttaaaa

SEQ ID NO: 276325 - DNA, 25 bp, Probe sequence
ttaaaagctggattaagtcctgtga

SEQ ID NO: 276326 - DNA, 25 bp, Probe sequence
aaagtggatgttcaggaaacggttg

SEQ ID NO: 276327 - DNA, 25 bp, Probe sequence
agtggatgttcaggaaacggttggt

SEQ ID NO: 276328 - DNA, 25 bp, Probe sequence
accatattctgaaagtgaagagaga

SEQ ID NO: 276329 - DNA, 25 bp, Probe sequence
aaagtgaagagagaacagcatatgg

SEQ ID NO: 276330 - DNA, 25 bp, Probe sequence
aagtggatgttcaggaaacggttgg

SEQ ID NO: 276331 - DNA, 25 bp, Probe sequence
aagtgaagagagaacagcatatggt

SEQ ID NO: 276332 - DNA, 25 bp, Probe sequence
gaaagtgaagagagaacagcatatg

SEQ ID NO: 276333 - DNA, 25 bp, Probe sequence
gtggatgttcaggaaacggttggta

SEQ ID NO: 276334 - DNA, 25 bp, Probe sequence
agaagcggttgcaaatgcagatgca

SEQ ID NO: 276335 - DNA, 25 bp, Probe sequence
agcggttgcaaatgcagatgcatct

SEQ ID NO: 276336 - DNA, 25 bp, Probe sequence
aagcggttgcaaatgcagatgcatc

SEQ ID NO: 276337 - DNA, 25 bp, Probe sequence
cggttgcaaatgcagatgcatcttg

SEQ ID NO: 276338 - DNA, 25 bp, Probe sequence
gcggttgcaaatgcagatgcatctt

SEQ ID NO: 276339 - DNA, 25 bp, Probe sequence
gaagcggttgcaaatgcagatgcat

SEQ ID NO: 276340 - DNA, 25 bp, Probe sequence
ggttgcaaatgcagatgcatcttgg

SEQ ID NO: 276341 - DNA, 25 bp, Probe sequence
atagtgtatattttgcctacgttac

SEQ ID NO: 276342 - DNA, 25 bp, Probe sequence
aggctgacgaatcttggaaaactaa

SEQ ID NO: 276343 - DNA, 25 bp, Probe sequence
acagaagcttctcaatatggtccga

SEQ ID NO: 276344 - DNA, 25 bp, Probe sequence
acaactgaagaagcaccattaccaa

SEQ ID NO: 276345 - DNA, 25 bp, Probe sequence
aaaccacaaggtactgaatcaacgt

SEQ ID NO: 276346 - DNA, 25 bp, Probe sequence
aaacagaccatctttaagcgataat

SEQ ID NO: 276347 - DNA, 25 bp, Probe sequence
aactgtaacaaaatctcctgttgta

SEQ ID NO: 276348 - DNA, 25 bp, Probe sequence
aaggtcctgatttcccaacaatgga

SEQ ID NO: 276349 - DNA, 25 bp, Probe sequence
aatcgttcaaggtcctgatttccca

SEQ ID NO: 276350 - DNA, 25 bp, Probe sequence
aatacgatcttggcgatttaactat

SEQ ID NO: 276351 - DNA, 25 bp, Probe sequence
aattaccacaaattgggactcaagg

SEQ ID NO: 276352 - DNA, 25 bp, Probe sequence
cctacgttacagatgctccacataa

SEQ ID NO: 276353 - DNA, 25 bp, Probe sequence
gcgcaaccactagttaaattaccac

SEQ ID NO: 276354 - DNA, 25 bp, Probe sequence
gcaccattaccaattgcgcaaccac

SEQ ID NO: 276355 - DNA, 25 bp, Probe sequence
gaatagacctcaacacattactagg

SEQ ID NO: 276356 - DNA, 25 bp, Probe sequence
gaaggtcttgaaggtagctcatcta

SEQ ID NO: 276357 - DNA, 25 bp, Probe sequence
gaaggtagctcatctaaacttgaaa

SEQ ID NO: 276358 - DNA, 25 bp, Probe sequence
gaaccagttttacaatatttttcat

SEQ ID NO: 276359 - DNA, 25 bp, Probe sequence
gaacctcaagcacctaaagtttctg

SEQ ID NO: 276360 - DNA, 25 bp, Probe sequence
gagaagcggtttctaaggctgacga

SEQ ID NO: 276361 - DNA, 25 bp, Probe sequence
gagaatccagatttaagaccatatt

SEQ ID NO: 276362 - DNA, 25 bp, Probe sequence
gagatgctggtacaggtatccgtga

SEQ ID NO: 276363 - DNA, 25 bp, Probe sequence
gatggatttgatgctctagttaaag

SEQ ID NO: 276364 - DNA, 25 bp, Probe sequence
gataattatactcaaccatcgttaa

SEQ ID NO: 276365 - DNA, 25 bp, Probe sequence
gttaaacctcaagcaactgaaacaa

SEQ ID NO: 276366 - DNA, 25 bp, Probe sequence
gggaaatcacaagttaatgctggga

SEQ ID NO: 276367 - DNA, 25 bp, Probe sequence
ggtcccgactatccaacgatggaaa

SEQ ID NO: 276368 - DNA, 25 bp, Probe sequence
ggaagaccaatacctgctagaaaga

SEQ ID NO: 276369 - DNA, 25 bp, Probe sequence
tggtccgagaccgcaatttaacaaa

SEQ ID NO: 276370 - DNA, 25 bp, Probe sequence
tgtaaaaggtcccgactatccaacg

SEQ ID NO: 276371 - DNA, 25 bp, Probe sequence
tcaaccatcgttaacgaaccctatt

SEQ ID NO: 276372 - DNA, 25 bp, Probe sequence
tagagtgacgaatcaacgtactgaa

SEQ ID NO: 276373 - DNA, 25 bp, Probe sequence
tagattcacttgttgatcaagcata

SEQ ID NO: 276374 - DNA, 25 bp, Probe sequence
tatttttcatttattggatcagcat

SEQ ID NO: 276375 - DNA, 25 bp, Probe sequence
atataatcctacaacacataactat

SEQ ID NO: 276376 - DNA, 25 bp, Probe sequence
atacgatctcgtatctgaaattgat

SEQ ID NO: 276377 - DNA, 25 bp, Probe sequence
ataatttagaagaactttcgatgaa

SEQ ID NO: 276378 - DNA, 25 bp, Probe sequence
atcctcgtacagatttaaaaatggc

SEQ ID NO: 276379 - DNA, 25 bp, Probe sequence
agaccgaaatctataacgaaatata

SEQ ID NO: 276380 - DNA, 25 bp, Probe sequence
agaatacaatgaactacaggatgca

SEQ ID NO: 276381 - DNA, 25 bp, Probe sequence
agcagatatttaaattcagctctat

SEQ ID NO: 276382 - DNA, 25 bp, Probe sequence
agctctatattatttggaagactat

SEQ ID NO: 276383 - DNA, 25 bp, Probe sequence
acattagttgtatcatattatggtg

SEQ ID NO: 276384 - DNA, 25 bp, Probe sequence
aaatggctaattttcataaatataa

SEQ ID NO: 276385 - DNA, 25 bp, Probe sequence
aactaaggaagtatacgatctcgta

SEQ ID NO: 276386 - DNA, 25 bp, Probe sequence
aacgaaatataatcctacaacacat

SEQ ID NO: 276387 - DNA, 25 bp, Probe sequence
aagagagcactggatgattttcaca

SEQ ID NO: 276388 - DNA, 25 bp, Probe sequence
aatcctacaacacataactataaaa

SEQ ID NO: 276389 - DNA, 25 bp, Probe sequence
aatttatgctataggattaactaat

SEQ ID NO: 276390 - DNA, 25 bp, Probe sequence
aattcagctctatattatttggaag

SEQ ID NO: 276391 - DNA, 25 bp, Probe sequence
cagacttgaaaacttttaatgcagc

SEQ ID NO: 276392 - DNA, 25 bp, Probe sequence
caggatgcattaaagagagcactgg

SEQ ID NO: 276393 - DNA, 25 bp, Probe sequence
cttgaaaacttttaatgcagcagaa

SEQ ID NO: 276394 - DNA, 25 bp, Probe sequence
cgatctcgtatctgaaattgataca

SEQ ID NO: 276395 - DNA, 25 bp, Probe sequence
gctaaagataggttgttggaaaagg

SEQ ID NO: 276396 - DNA, 25 bp, Probe sequence
gcagcagaagaagataaagcaacta

SEQ ID NO: 276397 - DNA, 25 bp, Probe sequence
gcactggatgattttcacagagaag

SEQ ID NO: 276398 - DNA, 25 bp, Probe sequence
gaagattataaacaatggtatgcaa

SEQ ID NO: 276399 - DNA, 25 bp, Probe sequence
gagcactggatgattttcacagaga

SEQ ID NO: 276400 - DNA, 25 bp, Probe sequence
gagagcactggatgattttcacaga

SEQ ID NO: 276401 - DNA, 25 bp, Probe sequence
ggatgattttcacagagaagttaaa

SEQ ID NO: 276402 - DNA, 25 bp, Probe sequence
ggaagtatacgatctcgtatctgaa

SEQ ID NO: 276403 - DNA, 25 bp, Probe sequence
ggaagactatataatttatgctata

SEQ ID NO: 276404 - DNA, 25 bp, Probe sequence
tggaaaaggtattaagggaagatca

SEQ ID NO: 276405 - DNA, 25 bp, Probe sequence
tgaactacaggatgcattaaagaga

SEQ ID NO: 276406 - DNA, 25 bp, Probe sequence
taaaaaagaaaatcctcgtacagat

SEQ ID NO: 276407 - DNA, 25 bp, Probe sequence
tatttaaattcagctctatattatt

SEQ ID NO: 276408 - DNA, 25 bp, Probe sequence
ttaaggataagaattcagacttgaa

SEQ ID NO: 276409 - DNA, 25 bp, Probe sequence
ataaaccgcatcgtatttctaatga

SEQ ID NO: 276410 - DNA, 25 bp, Probe sequence
ataagcctggtaatattacgagtta

SEQ ID NO: 276411 - DNA, 25 bp, Probe sequence
atgggacattaatttcagactggta

SEQ ID NO: 276412 - DNA, 25 bp, Probe sequence
aggttttgaggctctagtcaaagaa

SEQ ID NO: 276413 - DNA, 25 bp, Probe sequence
agaagcagtagcaaacgctgacgaa

SEQ ID NO: 276414 - DNA, 25 bp, Probe sequence
agcggtccatctttaagcgacaatt

SEQ ID NO: 276415 - DNA, 25 bp, Probe sequence
aaagggagattaactagtctagaat

SEQ ID NO: 276416 - DNA, 25 bp, Probe sequence
aacatcatgatttgaaaccatttac

SEQ ID NO: 276417 - DNA, 25 bp, Probe sequence
aactagtctagaatctcaatttatc

SEQ ID NO: 276418 - DNA, 25 bp, Probe sequence
aaccgcatcgtatttctaatgaaag

SEQ ID NO: 276419 - DNA, 25 bp, Probe sequence
aagtgctgtaaaagactttgagaaa

SEQ ID NO: 276420 - DNA, 25 bp, Probe sequence
caatgcattggatattttagagaca

SEQ ID NO: 276421 - DNA, 25 bp, Probe sequence
caaagcggtccatctttaagcgaca

SEQ ID NO: 276422 - DNA, 25 bp, Probe sequence
cacagtgaaggttttgaggctctag

SEQ ID NO: 276423 - DNA, 25 bp, Probe sequence
cagactggtatttaaaagggagatt

SEQ ID NO: 276424 - DNA, 25 bp, Probe sequence
catatagtgtttattttgcatttgt

SEQ ID NO: 276425 - DNA, 25 bp, Probe sequence
ctggtttaaataagcctggtaatat

SEQ ID NO: 276426 - DNA, 25 bp, Probe sequence
gaatctcaatttatcaatgcattgg

SEQ ID NO: 276427 - DNA, 25 bp, Probe sequence
gaagatttaactatgagggaatata

SEQ ID NO: 276428 - DNA, 25 bp, Probe sequence
gaacaaagcggtccatctttaagcg

SEQ ID NO: 276429 - DNA, 25 bp, Probe sequence
gaaaacattcgatcaatatacaata

SEQ ID NO: 276430 - DNA, 25 bp, Probe sequence
gagaatccaacctctaaaggcttaa

SEQ ID NO: 276431 - DNA, 25 bp, Probe sequence
gatttgaaaccatttactgatgaaa

SEQ ID NO: 276432 - DNA, 25 bp, Probe sequence
gtaaacatcactataaaaatcacag

SEQ ID NO: 276433 - DNA, 25 bp, Probe sequence
gtctagaatctcaatttatcaatgc

SEQ ID NO: 276434 - DNA, 25 bp, Probe sequence
gtgaaggttttgaggctctagtcaa

SEQ ID NO: 276435 - DNA, 25 bp, Probe sequence
gtgtttattttgcatttgttaggga

SEQ ID NO: 276436 - DNA, 25 bp, Probe sequence
ggtgatgaggataaaccgcatcgta

SEQ ID NO: 276437 - DNA, 25 bp, Probe sequence
ggtccatctttaagcgacaattata

SEQ ID NO: 276438 - DNA, 25 bp, Probe sequence
ggaagagaaggctacttctagagtt

SEQ ID NO: 276439 - DNA, 25 bp, Probe sequence
ggcttaaaactgaaaacattcgatc

SEQ ID NO: 276440 - DNA, 25 bp, Probe sequence
tgacaagaattttaggggaagacca

SEQ ID NO: 276441 - DNA, 25 bp, Probe sequence
tccaacctctaaaggcttaaaactg

SEQ ID NO: 276442 - DNA, 25 bp, Probe sequence
tttagagacatatcattatggcgaa

SEQ ID NO: 276443 - DNA, 25 bp, Probe sequence
attaagtgaagatcaagtatttact

SEQ ID NO: 276444 - DNA, 25 bp, Probe sequence
atatgagtaaaaatccaacgtcaaa

SEQ ID NO: 276445 - DNA, 25 bp, Probe sequence
atagtgcttcaatatcagatagtta

SEQ ID NO: 276446 - DNA, 25 bp, Probe sequence
atagttattattgggatatcattaa

SEQ ID NO: 276447 - DNA, 25 bp, Probe sequence
ataaacctgataatattacgagtta

SEQ ID NO: 276448 - DNA, 25 bp, Probe sequence
ataatatcgaagacctaagagaaaa

SEQ ID NO: 276449 - DNA, 25 bp, Probe sequence
atcaatataatatcgaagacctaag

SEQ ID NO: 276450 - DNA, 25 bp, Probe sequence
atgaggacaaaccacatcgcatctc

SEQ ID NO: 276451 - DNA, 25 bp, Probe sequence
agaaaagaaggctgcttctagagtt

SEQ ID NO: 276452 - DNA, 25 bp, Probe sequence
agcaaataatattcctaggcgcatt

SEQ ID NO: 276453 - DNA, 25 bp, Probe sequence
acatcgcatctctaataaaagaatt

SEQ ID NO: 276454 - DNA, 25 bp, Probe sequence
aaatgttacaaggtgaaatagttca

SEQ ID NO: 276455 - DNA, 25 bp, Probe sequence
aaaagcaaaagatcaactaatgaca

SEQ ID NO: 276456 - DNA, 25 bp, Probe sequence
aaccacatcgcatctctaataaaag

SEQ ID NO: 276457 - DNA, 25 bp, Probe sequence
aagccgtcgataaggctgacgaatc

SEQ ID NO: 276458 - DNA, 25 bp, Probe sequence
aagcgtatagcgtttattttgcgtt

SEQ ID NO: 276459 - DNA, 25 bp, Probe sequence
aataatattcctaggcgcattagca

SEQ ID NO: 276460 - DNA, 25 bp, Probe sequence
aatataatgatttactaagttctat

SEQ ID NO: 276461 - DNA, 25 bp, Probe sequence
caaaccacatcgcatctctaataaa

SEQ ID NO: 276462 - DNA, 25 bp, Probe sequence
ctaagttctattaaagatgcggtag

SEQ ID NO: 276463 - DNA, 25 bp, Probe sequence
ccaaaatagtgcttcaatatcagat

SEQ ID NO: 276464 - DNA, 25 bp, Probe sequence
gcgtatagcgtttattttgcgtttg

SEQ ID NO: 276465 - DNA, 25 bp, Probe sequence
gagaagccgtcgataaggctgacga

SEQ ID NO: 276466 - DNA, 25 bp, Probe sequence
gagttaaaatcttattcttacgaag

SEQ ID NO: 276467 - DNA, 25 bp, Probe sequence
gatgcggtagaaacatttaaatcag

SEQ ID NO: 276468 - DNA, 25 bp, Probe sequence
gattatcgatatggtgaaaaagagt

SEQ ID NO: 276469 - DNA, 25 bp, Probe sequence
gtatagcgtttattttgcgtttgtt

SEQ ID NO: 276470 - DNA, 25 bp, Probe sequence
gtaaacatgactataaacatcatag

SEQ ID NO: 276471 - DNA, 25 bp, Probe sequence
ggtgatgaggacaaaccacatcgca

SEQ ID NO: 276472 - DNA, 25 bp, Probe sequence
tgaggacaaaccacatcgcatctct

SEQ ID NO: 276473 - DNA, 25 bp, Probe sequence
tccaacgtcaaaggtaaaaagagca

SEQ ID NO: 276474 - DNA, 25 bp, Probe sequence
tagcgtttattttgcgtttgttagg

SEQ ID NO: 276475 - DNA, 25 bp, Probe sequence
tagaattacaatttactgctgcatt

SEQ ID NO: 276476 - DNA, 25 bp, Probe sequence
ttagcaaataaagcgtatagcgttt

SEQ ID NO: 276477 - DNA, 25 bp, Probe sequence
atttaaaaccatattctgaaagcga

SEQ ID NO: 276478 - DNA, 25 bp, Probe sequence
accaagttgaatagacctaaacaca

SEQ ID NO: 276479 - DNA, 25 bp, Probe sequence
acaagaggttaaaattacagttgat

SEQ ID NO: 276480 - DNA, 25 bp, Probe sequence
aaaccatattctgaaagcgaagaaa

SEQ ID NO: 276481 - DNA, 25 bp, Probe sequence
aaaaccatattctgaaagcgaagaa

SEQ ID NO: 276482 - DNA, 25 bp, Probe sequence
caagaggttaaaattacagttgata

SEQ ID NO: 276483 - DNA, 25 bp, Probe sequence
ccaagttgaatagacctaaacacat

SEQ ID NO: 276484 - DNA, 25 bp, Probe sequence
gatttaaaaccatattctgaaagcg

SEQ ID NO: 276485 - DNA, 25 bp, Probe sequence
tgaaaccaagttgaatagacctaaa

SEQ ID NO: 276486 - DNA, 25 bp, Probe sequence
taaaaccatattctgaaagcgaaga

SEQ ID NO: 276487 - DNA, 25 bp, Probe sequence
ttgaaaccaagttgaatagacctaa

SEQ ID NO: 276488 - DNA, 25 bp, Probe sequence
tttaaaaccatattctgaaagcgaa

SEQ ID NO: 276489 - DNA, 25 bp, Probe sequence
ttaaaaccatattctgaaagcgaag

SEQ ID NO: 276490 - DNA, 25 bp, Probe sequence
attgacacattatacgcagcatatt

SEQ ID NO: 276491 - DNA, 25 bp, Probe sequence
attcatgactatactaataagcctg

SEQ ID NO: 276492 - DNA, 25 bp, Probe sequence
atttgacgattttgatttatataga

SEQ ID NO: 276493 - DNA, 25 bp, Probe sequence
atccgaatattcatgactatactaa

SEQ ID NO: 276494 - DNA, 25 bp, Probe sequence
agattaggggatcaaatatactacg

SEQ ID NO: 276495 - DNA, 25 bp, Probe sequence
agattcaacaagccaagcgaaacaa

SEQ ID NO: 276496 - DNA, 25 bp, Probe sequence
agatataattcttggtgatgctaaa

SEQ ID NO: 276497 - DNA, 25 bp, Probe sequence
aaagtgaaaatccacattctagttt

SEQ ID NO: 276498 - DNA, 25 bp, Probe sequence
aaaaggatttattaccttatgatga

SEQ ID NO: 276499 - DNA, 25 bp, Probe sequence
aactaaatttaatccgaatattcat

SEQ ID NO: 276500 - DNA, 25 bp, Probe sequence
aagatcctgttagaattacgaatga

SEQ ID NO: 276501 - DNA, 25 bp, Probe sequence
aatacgatacaccaattccagattg

SEQ ID NO: 276502 - DNA, 25 bp, Probe sequence
aatacaatgagttacatcaatcatt

SEQ ID NO: 276503 - DNA, 25 bp, Probe sequence
aattccagattggtatctaggtagt

SEQ ID NO: 276504 - DNA, 25 bp, Probe sequence
cttggtgatgctaaagatcctgtta

SEQ ID NO: 276505 - DNA, 25 bp, Probe sequence
gcagcatattttaatcatagccaat

SEQ ID NO: 276506 - DNA, 25 bp, Probe sequence
gcaaagctagatataattcttggtg

SEQ ID NO: 276507 - DNA, 25 bp, Probe sequence
gaatatatgattttgtttgcgagat

SEQ ID NO: 276508 - DNA, 25 bp, Probe sequence
gaatcttggaaaacaagaaccgtca

SEQ ID NO: 276509 - DNA, 25 bp, Probe sequence
gaagcaactgaaaatcgagtaacaa

SEQ ID NO: 276510 - DNA, 25 bp, Probe sequence
gaagctgttgatgagtttaatagtg

SEQ ID NO: 276511 - DNA, 25 bp, Probe sequence
gaaagagtataagcaagcgatagat

SEQ ID NO: 276512 - DNA, 25 bp, Probe sequence
gactatactaataagcctgaaaata

SEQ ID NO: 276513 - DNA, 25 bp, Probe sequence
gagaacagtaaatacgatacaccaa

SEQ ID NO: 276514 - DNA, 25 bp, Probe sequence
gagattgacacattatacgcagcat

SEQ ID NO: 276515 - DNA, 25 bp, Probe sequence
gatacaccaattccagattggtatc

SEQ ID NO: 276516 - DNA, 25 bp, Probe sequence
gattttgtttgcgagattgacacat

SEQ ID NO: 276517 - DNA, 25 bp, Probe sequence
gttacatcaatcattaaaagaagct

SEQ ID NO: 276518 - DNA, 25 bp, Probe sequence
gtaaatacgatacaccaattccaga

SEQ ID NO: 276519 - DNA, 25 bp, Probe sequence
ggtgatgctaaagatcctgttagaa

SEQ ID NO: 276520 - DNA, 25 bp, Probe sequence
ggtatctaggtagtattttaaacag

SEQ ID NO: 276521 - DNA, 25 bp, Probe sequence
tgaaaatccacattctagtttaaaa

SEQ ID NO: 276522 - DNA, 25 bp, Probe sequence
taatcatagccaatatggtcataat

SEQ ID NO: 276523 - DNA, 25 bp, Probe sequence
tacgcagcatattttaatcatagcc

SEQ ID NO: 276524 - DNA, 25 bp, Probe sequence
attaggtgaagaccaatacttatta

SEQ ID NO: 276525 - DNA, 25 bp, Probe sequence
atatccatcactctctaaaaggtgc

SEQ ID NO: 276526 - DNA, 25 bp, Probe sequence
atcactctctaaaaggtgcagtgga

SEQ ID NO: 276527 - DNA, 25 bp, Probe sequence
atccatcactctctaaaaggtgcag

SEQ ID NO: 276528 - DNA, 25 bp, Probe sequence
atgatatccatcactctctaaaagg

SEQ ID NO: 276529 - DNA, 25 bp, Probe sequence
agtgaaattgatactcttgttgtaa

SEQ ID NO: 276530 - DNA, 25 bp, Probe sequence
actctctaaaaggtgcagtggaaga

SEQ ID NO: 276531 - DNA, 25 bp, Probe sequence
actcttgttgtaacatattatggag

SEQ ID NO: 276532 - DNA, 25 bp, Probe sequence
aaagacaaattgatgactagggtat

SEQ ID NO: 276533 - DNA, 25 bp, Probe sequence
aaactgataaagtatattcattagt

SEQ ID NO: 276534 - DNA, 25 bp, Probe sequence
aaaaggtgcagtggaagagttctat

SEQ ID NO: 276535 - DNA, 25 bp, Probe sequence
aagagtataaagacgccaaagacaa

SEQ ID NO: 276536 - DNA, 25 bp, Probe sequence
aagacgccaaagacaaattgatgac

SEQ ID NO: 276537 - DNA, 25 bp, Probe sequence
aaggtgcagtggaagagttctataa

SEQ ID NO: 276538 - DNA, 25 bp, Probe sequence
aatgatatccatcactctctaaaag

SEQ ID NO: 276539 - DNA, 25 bp, Probe sequence
aattgatactcttgttgtaacatat

SEQ ID NO: 276540 - DNA, 25 bp, Probe sequence
ctagggtattaggtgaagaccaata

SEQ ID NO: 276541 - DNA, 25 bp, Probe sequence
ccatcactctctaaaaggtgcagtg

SEQ ID NO: 276542 - DNA, 25 bp, Probe sequence
gcagtggaagagttctataaagaag

SEQ ID NO: 276543 - DNA, 25 bp, Probe sequence
gactagggtattaggtgaagaccaa

SEQ ID NO: 276544 - DNA, 25 bp, Probe sequence
gaaattttatgattataacctttat

SEQ ID NO: 276545 - DNA, 25 bp, Probe sequence
gaaattgatactcttgttgtaacat

SEQ ID NO: 276546 - DNA, 25 bp, Probe sequence
gacaaattgatgactagggtattag

SEQ ID NO: 276547 - DNA, 25 bp, Probe sequence
gatgactagggtattaggtgaagac

SEQ ID NO: 276548 - DNA, 25 bp, Probe sequence
gatactcttgttgtaacatattatg

SEQ ID NO: 276549 - DNA, 25 bp, Probe sequence
gataaagtatattcattagttagtg

SEQ ID NO: 276550 - DNA, 25 bp, Probe sequence
gatatccatcactctctaaaaggtg

SEQ ID NO: 276551 - DNA, 25 bp, Probe sequence
ggtgcagtggaagagttctataaag

SEQ ID NO: 276552 - DNA, 25 bp, Probe sequence
tgatatccatcactctctaaaaggt

SEQ ID NO: 276553 - DNA, 25 bp, Probe sequence
tgattataacctttatgattttaca

SEQ ID NO: 276554 - DNA, 25 bp, Probe sequence
tccatcactctctaaaaggtgcagt

SEQ ID NO: 276555 - DNA, 25 bp, Probe sequence
tttaagcccggtgaaattttatgat

SEQ ID NO: 276556 - DNA, 25 bp, Probe sequence
taatgatatccatcactctctaaaa

SEQ ID NO: 276557 - DNA, 25 bp, Probe sequence
tatccatcactctctaaaaggtgca

SEQ ID NO: 276558 - DNA, 25 bp, Probe sequence
attacgatgaatctgtaacaaaagc

SEQ ID NO: 276559 - DNA, 25 bp, Probe sequence
ataaccaacaagatgacaaagcaac

SEQ ID NO: 276560 - DNA, 25 bp, Probe sequence
ataaactagaaaacaaagcacattt

SEQ ID NO: 276561 - DNA, 25 bp, Probe sequence
atgaatctgtaacaaaagcacatgt

SEQ ID NO: 276562 - DNA, 25 bp, Probe sequence
accaacaagatgacaaagcaacaca

SEQ ID NO: 276563 - DNA, 25 bp, Probe sequence
acgatgaatctgtaacaaaagcaca

SEQ ID NO: 276564 - DNA, 25 bp, Probe sequence
acaagatgacaaagcaacacaacca

SEQ ID NO: 276565 - DNA, 25 bp, Probe sequence
aaattacgatgaatctgtaacaaaa

SEQ ID NO: 276566 - DNA, 25 bp, Probe sequence
aaactagaaaacaaagcacattttg

SEQ ID NO: 276567 - DNA, 25 bp, Probe sequence
aaaaattacgatgaatctgtaacaa

SEQ ID NO: 276568 - DNA, 25 bp, Probe sequence
aaaattacgatgaatctgtaacaaa

SEQ ID NO: 276569 - DNA, 25 bp, Probe sequence
aacaagatgacaaagcaacacaacc

SEQ ID NO: 276570 - DNA, 25 bp, Probe sequence
aactagaaaacaaagcacattttga

SEQ ID NO: 276571 - DNA, 25 bp, Probe sequence
aaccaacaagatgacaaagcaacac

SEQ ID NO: 276572 - DNA, 25 bp, Probe sequence
aataaactagaaaacaaagcacatt

SEQ ID NO: 276573 - DNA, 25 bp, Probe sequence
aattacgatgaatctgtaacaaaag

SEQ ID NO: 276574 - DNA, 25 bp, Probe sequence
caacaagatgacaaagcaacacaac

SEQ ID NO: 276575 - DNA, 25 bp, Probe sequence
caaaaattacgatgaatctgtaaca

SEQ ID NO: 276576 - DNA, 25 bp, Probe sequence
cgatgaatctgtaacaaaagcacat

SEQ ID NO: 276577 - DNA, 25 bp, Probe sequence
ccaacaagatgacaaagcaacacaa

SEQ ID NO: 276578 - DNA, 25 bp, Probe sequence
gatgaatctgtaacaaaagcacatg

SEQ ID NO: 276579 - DNA, 25 bp, Probe sequence
gataaccaacaagatgacaaagcaa

SEQ ID NO: 276580 - DNA, 25 bp, Probe sequence
tgataaccaacaagatgacaaagca

SEQ ID NO: 276581 - DNA, 25 bp, Probe sequence
taaccaacaagatgacaaagcaaca

SEQ ID NO: 276582 - DNA, 25 bp, Probe sequence
taaactagaaaacaaagcacatttt

SEQ ID NO: 276583 - DNA, 25 bp, Probe sequence
tacgatgaatctgtaacaaaagcac

SEQ ID NO: 276584 - DNA, 25 bp, Probe sequence
tttgaggctctagttgaagaaacga

SEQ ID NO: 276585 - DNA, 25 bp, Probe sequence
ttacgatgaatctgtaacaaaagca

SEQ ID NO: 276586 - DNA, 25 bp, Probe sequence
atagacacacttgtagctacgtatt

SEQ ID NO: 276587 - DNA, 25 bp, Probe sequence
atacgatcctagaattcatgacttt

SEQ ID NO: 276588 - DNA, 25 bp, Probe sequence
atggcgaccagaattatagagaaaa

SEQ ID NO: 276589 - DNA, 25 bp, Probe sequence
agagaaaatgcgaaagaacttagaa

SEQ ID NO: 276590 - DNA, 25 bp, Probe sequence
aaagatgcggttgctaaggctgata

SEQ ID NO: 276591 - DNA, 25 bp, Probe sequence
aagaaactaaagatgcggttgctaa

SEQ ID NO: 276592 - DNA, 25 bp, Probe sequence
aatggatttaatacttggagattct

SEQ ID NO: 276593 - DNA, 25 bp, Probe sequence
aattctgatttgaagtcttttgaca

SEQ ID NO: 276594 - DNA, 25 bp, Probe sequence
caaaacagacctacaacgataaaga

SEQ ID NO: 276595 - DNA, 25 bp, Probe sequence
cttgtagctacgtattatggcgacc

SEQ ID NO: 276596 - DNA, 25 bp, Probe sequence
ctaaggctgataattcttggaaaac

SEQ ID NO: 276597 - DNA, 25 bp, Probe sequence
cgatcctagaattcatgactttact

SEQ ID NO: 276598 - DNA, 25 bp, Probe sequence
cctagaattcatgactttactaaga

SEQ ID NO: 276599 - DNA, 25 bp, Probe sequence
gcgaagttcaactacaaaattctga

SEQ ID NO: 276600 - DNA, 25 bp, Probe sequence
gcggttgctaaggctgataattctt

SEQ ID NO: 276601 - DNA, 25 bp, Probe sequence
gctacgtattatggcgaccagaatt

SEQ ID NO: 276602 - DNA, 25 bp, Probe sequence
gaataaaagtaacttcgatgcttta

SEQ ID NO: 276603 - DNA, 25 bp, Probe sequence
gaaagatttaaattcaatcattgat

SEQ ID NO: 276604 - DNA, 25 bp, Probe sequence
gaaatagacacacttgtagctacgt

SEQ ID NO: 276605 - DNA, 25 bp, Probe sequence
gaaatacgatcctagaattcatgac

SEQ ID NO: 276606 - DNA, 25 bp, Probe sequence
gacacacttgtagctacgtattatg

SEQ ID NO: 276607 - DNA, 25 bp, Probe sequence
gagaaactaaggctacagatgatat

SEQ ID NO: 276608 - DNA, 25 bp, Probe sequence
gagattctgataaccctaaccgaat

SEQ ID NO: 276609 - DNA, 25 bp, Probe sequence
gatgcggttgctaaggctgataatt

SEQ ID NO: 276610 - DNA, 25 bp, Probe sequence
gataaccctaaccgaattacgaatg

SEQ ID NO: 276611 - DNA, 25 bp, Probe sequence
gatactaatcaaaacagacctacaa

SEQ ID NO: 276612 - DNA, 25 bp, Probe sequence
gatatatacgattttgtttgtgaaa

SEQ ID NO: 276613 - DNA, 25 bp, Probe sequence
gatttgaagtcttttgacaaaacta

SEQ ID NO: 276614 - DNA, 25 bp, Probe sequence
gttgctaaggctgataattcttgga

SEQ ID NO: 276615 - DNA, 25 bp, Probe sequence
gtagctacgtattatggcgaccaga

SEQ ID NO: 276616 - DNA, 25 bp, Probe sequence
ggctacagatgatatatacgatttt

SEQ ID NO: 276617 - DNA, 25 bp, Probe sequence
tggagattctgataaccctaaccga

SEQ ID NO: 276618 - DNA, 25 bp, Probe sequence
tgatgatttctttatagatactaat

SEQ ID NO: 276619 - DNA, 25 bp, Probe sequence
ttctgataaccctaaccgaattacg

SEQ ID NO: 276620 - DNA, 25 bp, Probe sequence
atcggaattgtcggtggcgtaaacg

SEQ ID NO: 276621 - DNA, 25 bp, Probe sequence
attgtcggtggcgtaaacgcttgca

SEQ ID NO: 276622 - DNA, 25 bp, Probe sequence
attagctaaagcaatcggaattgtc

SEQ ID NO: 276623 - DNA, 25 bp, Probe sequence
atacacttgttaatatgttttttga

SEQ ID NO: 276624 - DNA, 25 bp, Probe sequence
cggaattgtcggtggcgtaaacgct

SEQ ID NO: 276625 - DNA, 25 bp, Probe sequence
tcggaattgtcggtggcgtaaacgc

SEQ ID NO: 276626 - DNA, 25 bp, Probe sequence
atgaatacacttgttaatatgtttt

SEQ ID NO: 276627 - DNA, 25 bp, Probe sequence
agcaatcggaattgtcggtggcgta

SEQ ID NO: 276628 - DNA, 25 bp, Probe sequence
agctaaagcaatcggaattgtcggt

SEQ ID NO: 276629 - DNA, 25 bp, Probe sequence
acacttgttaatatgttttttgatt

SEQ ID NO: 276630 - DNA, 25 bp, Probe sequence
aaattagctaaagcaatcggaattg

SEQ ID NO: 276631 - DNA, 25 bp, Probe sequence
aaagcaatcggaattgtcggtggcg

SEQ ID NO: 276632 - DNA, 25 bp, Probe sequence
aagcaatcggaattgtcggtggcgt

SEQ ID NO: 276633 - DNA, 25 bp, Probe sequence
aatacacttgttaatatgttttttg

SEQ ID NO: 276634 - DNA, 25 bp, Probe sequence
aattgtcggtggcgtaaacgcttgc

SEQ ID NO: 276635 - DNA, 25 bp, Probe sequence
aattagctaaagcaatcggaattgt

SEQ ID NO: 276636 - DNA, 25 bp, Probe sequence
caatcggaattgtcggtggcgtaaa

SEQ ID NO: 276637 - DNA, 25 bp, Probe sequence
cacttgttaatatgttttttgattt

SEQ ID NO: 276638 - DNA, 25 bp, Probe sequence
ctaaagcaatcggaattgtcggtgg

SEQ ID NO: 276639 - DNA, 25 bp, Probe sequence
gctaaagcaatcggaattgtcggtg

SEQ ID NO: 276640 - DNA, 25 bp, Probe sequence
gaattgtcggtggcgtaaacgcttg

SEQ ID NO: 276641 - DNA, 25 bp, Probe sequence
gcaatcggaattgtcggtggcgtaa

SEQ ID NO: 276642 - DNA, 25 bp, Probe sequence
gaatacacttgttaatatgtttttt

SEQ ID NO: 276643 - DNA, 25 bp, Probe sequence
tgtcggtggcgtaaacgcttgcagc

SEQ ID NO: 276644 - DNA, 25 bp, Probe sequence
ggaattgtcggtggcgtaaacgctt

SEQ ID NO: 276645 - DNA, 25 bp, Probe sequence
tgttaatatgttttttgattttata

SEQ ID NO: 276646 - DNA, 25 bp, Probe sequence
tgaatacacttgttaatatgttttt

SEQ ID NO: 276647 - DNA, 25 bp, Probe sequence
taaagcaatcggaattgtcggtggc

SEQ ID NO: 276648 - DNA, 25 bp, Probe sequence
taaattagctaaagcaatcggaatt

SEQ ID NO: 276649 - DNA, 25 bp, Probe sequence
tacacttgttaatatgttttttgat

SEQ ID NO: 276650 - DNA, 25 bp, Probe sequence
tagctaaagcaatcggaattgtcgg

SEQ ID NO: 276651 - DNA, 25 bp, Probe sequence
ttagctaaagcaatcggaattgtcg

SEQ ID NO: 276652 - DNA, 25 bp, Probe sequence
ttgtcggtggcgtaaacgcttgcag

SEQ ID NO: 276653 - DNA, 25 bp, Probe sequence
ttgttaatatgttttttgattttat

SEQ ID NO: 276654 - DNA, 25 bp, Probe sequence
atataccgacgctccaagaatatag

SEQ ID NO: 276655 - DNA, 25 bp, Probe sequence
atttttacaactagcaaaatctact

SEQ ID NO: 276656 - DNA, 25 bp, Probe sequence
ataatgagtctataaggattgaggt

SEQ ID NO: 276657 - DNA, 25 bp, Probe sequence
atgagtctataaggattgaggtcga

SEQ ID NO: 276658 - DNA, 25 bp, Probe sequence
aggaaaggagtaggctataaagctg

SEQ ID NO: 276659 - DNA, 25 bp, Probe sequence
agtctataaggattgaggtcgaatg

SEQ ID NO: 276660 - DNA, 25 bp, Probe sequence
agtgataatgagtctataaggattg

SEQ ID NO: 276661 - DNA, 25 bp, Probe sequence
agatttgtctgaaagtacgaaaaag

SEQ ID NO: 276662 - DNA, 25 bp, Probe sequence
acagtgataatgagtctataaggat

SEQ ID NO: 276663 - DNA, 25 bp, Probe sequence
aatgagtctataaggattgaggtcg

SEQ ID NO: 276664 - DNA, 25 bp, Probe sequence
aatataccgacgctccaagaatata

SEQ ID NO: 276665 - DNA, 25 bp, Probe sequence
aatatttttacaactagcaaaatct

SEQ ID NO: 276666 - DNA, 25 bp, Probe sequence
aattacagtgataatgagtctataa

SEQ ID NO: 276667 - DNA, 25 bp, Probe sequence
cagtgataatgagtctataaggatt

SEQ ID NO: 276668 - DNA, 25 bp, Probe sequence
gcaaggaaaggagtaggctataaag

SEQ ID NO: 276669 - DNA, 25 bp, Probe sequence
gagtctataaggattgaggtcgaat

SEQ ID NO: 276670 - DNA, 25 bp, Probe sequence
gataatgagtctataaggattgagg

SEQ ID NO: 276671 - DNA, 25 bp, Probe sequence
gatttgtctgaaagtacgaaaaagt

SEQ ID NO: 276672 - DNA, 25 bp, Probe sequence
gttaattacagtgataatgagtcta

SEQ ID NO: 276673 - DNA, 25 bp, Probe sequence
gtctataaggattgaggtcgaatga

SEQ ID NO: 276674 - DNA, 25 bp, Probe sequence
gtgataatgagtctataaggattga

SEQ ID NO: 276675 - DNA, 25 bp, Probe sequence
tgtctgaaagtacgaaaaagttaca

SEQ ID NO: 276676 - DNA, 25 bp, Probe sequence
tgagtctataaggattgaggtcgaa

SEQ ID NO: 276677 - DNA, 25 bp, Probe sequence
taatgagtctataaggattgaggtc

SEQ ID NO: 276678 - DNA, 25 bp, Probe sequence
taattacagtgataatgagtctata

SEQ ID NO: 276679 - DNA, 25 bp, Probe sequence
tacaactagcaaaatctactattag

SEQ ID NO: 276680 - DNA, 25 bp, Probe sequence
tacagtgataatgagtctataagga

SEQ ID NO: 276681 - DNA, 25 bp, Probe sequence
tagatttgtctgaaagtacgaaaaa

SEQ ID NO: 276682 - DNA, 25 bp, Probe sequence
tatttttacaactagcaaaatctac

SEQ ID NO: 276683 - DNA, 25 bp, Probe sequence
tttacaactagcaaaatctactatt

SEQ ID NO: 276684 - DNA, 25 bp, Probe sequence
tttttacaactagcaaaatctacta

SEQ ID NO: 276685 - DNA, 25 bp, Probe sequence
ttttacaactagcaaaatctactat

SEQ ID NO: 276686 - DNA, 25 bp, Probe sequence
ttacaactagcaaaatctactatta

SEQ ID NO: 276687 - DNA, 25 bp, Probe sequence
ttacagtgataatgagtctataagg

SEQ ID NO: 276688 - DNA, 25 bp, Probe sequence
attatactgctaatagtaatacagt

SEQ ID NO: 276689 - DNA, 25 bp, Probe sequence
atagtaatacagtagcaacgttgtt

SEQ ID NO: 276690 - DNA, 25 bp, Probe sequence
atactgctaatagtaatacagtagc

SEQ ID NO: 276691 - DNA, 25 bp, Probe sequence
agattatactgctaatagtaataca

SEQ ID NO: 276692 - DNA, 25 bp, Probe sequence
actgctaatagtaatacagtagcaa

SEQ ID NO: 276693 - DNA, 25 bp, Probe sequence
aatagtaatacagtagcaacgttgt

SEQ ID NO: 276694 - DNA, 25 bp, Probe sequence
ctaatagtaatacagtagcaacgtt

SEQ ID NO: 276695 - DNA, 25 bp, Probe sequence
ctgctaatagtaatacagtagcaac

SEQ ID NO: 276696 - DNA, 25 bp, Probe sequence
gctaatagtaatacagtagcaacgt

SEQ ID NO: 276697 - DNA, 25 bp, Probe sequence
gattatactgctaatagtaatacag

SEQ ID NO: 276698 - DNA, 25 bp, Probe sequence
gttagattatactgctaatagtaat

SEQ ID NO: 276699 - DNA, 25 bp, Probe sequence
taatagtaatacagtagcaacgttg

SEQ ID NO: 276700 - DNA, 25 bp, Probe sequence
tactgctaatagtaatacagtagca

SEQ ID NO: 276701 - DNA, 25 bp, Probe sequence
tagattatactgctaatagtaatac

SEQ ID NO: 276702 - DNA, 25 bp, Probe sequence
tagtaatacagtagcaacgttgttt

SEQ ID NO: 276703 - DNA, 25 bp, Probe sequence
tatactgctaatagtaatacagtag

SEQ ID NO: 276704 - DNA, 25 bp, Probe sequence
ttatactgctaatagtaatacagta

SEQ ID NO: 276705 - DNA, 25 bp, Probe sequence
ttagattatactgctaatagtaata

SEQ ID NO: 276706 - DNA, 25 bp, Probe sequence
atagcaacgctactgttatcaggat

SEQ ID NO: 276707 - DNA, 25 bp, Probe sequence
atcaggatgttcagcgatgaataat

SEQ ID NO: 276708 - DNA, 25 bp, Probe sequence
atcttaatagcaacgctactgttat

SEQ ID NO: 276709 - DNA, 25 bp, Probe sequence
aggatgttcagcgatgaataatgaa

SEQ ID NO: 276710 - DNA, 25 bp, Probe sequence
agcaacgctactgttatcaggatgt

SEQ ID NO: 276711 - DNA, 25 bp, Probe sequence
acgctactgttatcaggatgttcag

SEQ ID NO: 276712 - DNA, 25 bp, Probe sequence
actgttatcaggatgttcagcgatg

SEQ ID NO: 276713 - DNA, 25 bp, Probe sequence
aacgctactgttatcaggatgttca

SEQ ID NO: 276714 - DNA, 25 bp, Probe sequence
aatagcaacgctactgttatcagga

SEQ ID NO: 276715 - DNA, 25 bp, Probe sequence
caacgctactgttatcaggatgttc

SEQ ID NO: 276716 - DNA, 25 bp, Probe sequence
caggatgttcagcgatgaataatga

SEQ ID NO: 276717 - DNA, 25 bp, Probe sequence
cttaatagcaacgctactgttatca

SEQ ID NO: 276718 - DNA, 25 bp, Probe sequence
ctactgttatcaggatgttcagcga

SEQ ID NO: 276719 - DNA, 25 bp, Probe sequence
ctgttatcaggatgttcagcgatga

SEQ ID NO: 276720 - DNA, 25 bp, Probe sequence
cgctactgttatcaggatgttcagc

SEQ ID NO: 276721 - DNA, 25 bp, Probe sequence
gctactgttatcaggatgttcagcg

SEQ ID NO: 276722 - DNA, 25 bp, Probe sequence
gcaacgctactgttatcaggatgtt

SEQ ID NO: 276723 - DNA, 25 bp, Probe sequence
gatgttcagcgatgaataatgaatc

SEQ ID NO: 276724 - DNA, 25 bp, Probe sequence
gttatcaggatgttcagcgatgaat

SEQ ID NO: 276725 - DNA, 25 bp, Probe sequence
tgttatcaggatgttcagcgatgaa

SEQ ID NO: 276726 - DNA, 25 bp, Probe sequence
ggatgttcagcgatgaataatgaat

SEQ ID NO: 276727 - DNA, 25 bp, Probe sequence
tcttaatagcaacgctactgttatc

SEQ ID NO: 276728 - DNA, 25 bp, Probe sequence
tcaggatgttcagcgatgaataatg

SEQ ID NO: 276729 - DNA, 25 bp, Probe sequence
taatagcaacgctactgttatcagg

SEQ ID NO: 276730 - DNA, 25 bp, Probe sequence
tactgttatcaggatgttcagcgat

SEQ ID NO: 276731 - DNA, 25 bp, Probe sequence
tagcaacgctactgttatcaggatg

SEQ ID NO: 276732 - DNA, 25 bp, Probe sequence
tatcaggatgttcagcgatgaataa

SEQ ID NO: 276733 - DNA, 25 bp, Probe sequence
ttatcaggatgttcagcgatgaata

SEQ ID NO: 276734 - DNA, 25 bp, Probe sequence
ttaatagcaacgctactgttatcag

SEQ ID NO: 276735 - DNA, 25 bp, Probe sequence
atatacaggttttactaaagaagca

SEQ ID NO: 276736 - DNA, 25 bp, Probe sequence
atatcaatatacaggttttactaaa

SEQ ID NO: 276737 - DNA, 25 bp, Probe sequence
atacaggttttactaaagaagcaat

SEQ ID NO: 276738 - DNA, 25 bp, Probe sequence
atcaatatacaggttttactaaaga

SEQ ID NO: 276739 - DNA, 25 bp, Probe sequence
atcaatgcgtagtaatgacaacggt

SEQ ID NO: 276740 - DNA, 25 bp, Probe sequence
atgcgtagtaatgacaacggtgatg

SEQ ID NO: 276741 - DNA, 25 bp, Probe sequence
atccaacaatgaaacaaaatcagta

SEQ ID NO: 276742 - DNA, 25 bp, Probe sequence
aatgcgtagtaatgacaacggtgat

SEQ ID NO: 276743 - DNA, 25 bp, Probe sequence
aatccaacaatgaaacaaaatcagt

SEQ ID NO: 276744 - DNA, 25 bp, Probe sequence
caatatacaggttttactaaagaag

SEQ ID NO: 276745 - DNA, 25 bp, Probe sequence
caatgcgtagtaatgacaacggtga

SEQ ID NO: 276746 - DNA, 25 bp, Probe sequence
cgtagtaatgacaacggtgatgata

SEQ ID NO: 276747 - DNA, 25 bp, Probe sequence
gcgtagtaatgacaacggtgatgat

SEQ ID NO: 276748 - DNA, 25 bp, Probe sequence
gaatccaacaatgaaacaaaatcag

SEQ ID NO: 276749 - DNA, 25 bp, Probe sequence
gatcaatgcgtagtaatgacaacgg

SEQ ID NO: 276750 - DNA, 25 bp, Probe sequence
gtagtaatgacaacggtgatgatat

SEQ ID NO: 276751 - DNA, 25 bp, Probe sequence
ggatcaatgcgtagtaatgacaacg

SEQ ID NO: 276752 - DNA, 25 bp, Probe sequence
tgcgtagtaatgacaacggtgatga

SEQ ID NO: 276753 - DNA, 25 bp, Probe sequence
tcaatgcgtagtaatgacaacggtg

SEQ ID NO: 276754 - DNA, 25 bp, Probe sequence
tcaatatacaggttttactaaagaa

SEQ ID NO: 276755 - DNA, 25 bp, Probe sequence
tacaggttttactaaagaagcaatt

SEQ ID NO: 276756 - DNA, 25 bp, Probe sequence
tatacaggttttactaaagaagcaa

SEQ ID NO: 276757 - DNA, 25 bp, Probe sequence
tatcaatatacaggttttactaaag

SEQ ID NO: 276758 - DNA, 25 bp, Probe sequence
atatcgagcacataaggaagagttg

SEQ ID NO: 276759 - DNA, 25 bp, Probe sequence
atacagaaacaaatacagaaacgaa

SEQ ID NO: 276760 - DNA, 25 bp, Probe sequence
ataaaattgctaaacgtggcgaaca

SEQ ID NO: 276761 - DNA, 25 bp, Probe sequence
atcgagcacataaggaagagttgga

SEQ ID NO: 276762 - DNA, 25 bp, Probe sequence
atgataagtcttttagggacggtat

SEQ ID NO: 276763 - DNA, 25 bp, Probe sequence
agggtgctccacgattgaaaatgaa

SEQ ID NO: 276764 - DNA, 25 bp, Probe sequence
agtactagtactgtcagggtgctcc

SEQ ID NO: 276765 - DNA, 25 bp, Probe sequence
actagtactgtcagggtgctccacg

SEQ ID NO: 276766 - DNA, 25 bp, Probe sequence
aaaattgctaaacgtggcgaacaat

SEQ ID NO: 276767 - DNA, 25 bp, Probe sequence
aagataatacaatagacgagatgat

SEQ ID NO: 276768 - DNA, 25 bp, Probe sequence
aatagacgagatgattgatttttct

SEQ ID NO: 276769 - DNA, 25 bp, Probe sequence
cagggtgctccacgattgaaaatga

SEQ ID NO: 276770 - DNA, 25 bp, Probe sequence
ctagtactgtcagggtgctccacga

SEQ ID NO: 276771 - DNA, 25 bp, Probe sequence
ctgtcagggtgctccacgattgaaa

SEQ ID NO: 276772 - DNA, 25 bp, Probe sequence
cgagcacataaggaagagttggata

SEQ ID NO: 276773 - DNA, 25 bp, Probe sequence
gcacataaggaagagttggataatt

SEQ ID NO: 276774 - DNA, 25 bp, Probe sequence
gaatatcgagcacataaggaagagt

SEQ ID NO: 276775 - DNA, 25 bp, Probe sequence
gacagaaatacagaaacaaatacag

SEQ ID NO: 276776 - DNA, 25 bp, Probe sequence
gatgataagtcttttagggacggta

SEQ ID NO: 276777 - DNA, 25 bp, Probe sequence
gaggatgataagtcttttagggacg

SEQ ID NO: 276778 - DNA, 25 bp, Probe sequence
gataaaattgctaaacgtggcgaac

SEQ ID NO: 276779 - DNA, 25 bp, Probe sequence
gtttctcttcaaatttctaataaat

SEQ ID NO: 276780 - DNA, 25 bp, Probe sequence
gtactagtactgtcagggtgctcca

SEQ ID NO: 276781 - DNA, 25 bp, Probe sequence
gtcagggtgctccacgattgaaaat

SEQ ID NO: 276782 - DNA, 25 bp, Probe sequence
ggatgataagtcttttagggacggt

SEQ ID NO: 276783 - DNA, 25 bp, Probe sequence
tgtcagggtgctccacgattgaaaa

SEQ ID NO: 276784 - DNA, 25 bp, Probe sequence
tgctaaacgtggcgaacaatttttt

SEQ ID NO: 276785 - DNA, 25 bp, Probe sequence
tcagggtgctccacgattgaaaatg

SEQ ID NO: 276786 - DNA, 25 bp, Probe sequence
tactgtcagggtgctccacgattga

SEQ ID NO: 276787 - DNA, 25 bp, Probe sequence
taatcttaatagcagtactagtact

SEQ ID NO: 276788 - DNA, 25 bp, Probe sequence
taaaattgctaaacgtggcgaacaa

SEQ ID NO: 276789 - DNA, 25 bp, Probe sequence
tactagtactgtcagggtgctccac

SEQ ID NO: 276790 - DNA, 25 bp, Probe sequence
tttctcttcaaatttctaataaata

SEQ ID NO: 276791 - DNA, 25 bp, Probe sequence
ttgctaaacgtggcgaacaattttt

SEQ ID NO: 276792 - DNA, 25 bp, Probe sequence
attttcaaaagaattgtcaaatgtt

SEQ ID NO: 276793 - DNA, 25 bp, Probe sequence
caaaagtgacagtgaattttcaaaa

SEQ ID NO: 276794 - DNA, 25 bp, Probe sequence
agtgacagtgaattttcaaaagaat

SEQ ID NO: 276795 - DNA, 25 bp, Probe sequence
agtgaattttcaaaagaattgtcaa

SEQ ID NO: 276796 - DNA, 25 bp, Probe sequence
agtatagagactattttgaaccatt

SEQ ID NO: 276797 - DNA, 25 bp, Probe sequence
agaattgtcaaatgttaagaagcaa

SEQ ID NO: 276798 - DNA, 25 bp, Probe sequence
agcacttcagaatatggtgtgtttg

SEQ ID NO: 276799 - DNA, 25 bp, Probe sequence
acagtgaattttcaaaagaattgtc

SEQ ID NO: 276800 - DNA, 25 bp, Probe sequence
acaaaagtgacagtgaattttcaaa

SEQ ID NO: 276801 - DNA, 25 bp, Probe sequence
aaagtgacagtgaattttcaaaaga

SEQ ID NO: 276802 - DNA, 25 bp, Probe sequence
aaacaaaagtgacagtgaattttca

SEQ ID NO: 276803 - DNA, 25 bp, Probe sequence
aaaagtgacagtgaattttcaaaag

SEQ ID NO: 276804 - DNA, 25 bp, Probe sequence
aacaaaagtgacagtgaattttcaa

SEQ ID NO: 276805 - DNA, 25 bp, Probe sequence
aagaattgtcaaatgttaagaagca

SEQ ID NO: 276806 - DNA, 25 bp, Probe sequence
aagtgacagtgaattttcaaaagaa

SEQ ID NO: 276807 - DNA, 25 bp, Probe sequence
aattttcaaaagaattgtcaaatgt

SEQ ID NO: 276808 - DNA, 25 bp, Probe sequence
cagtgaattttcaaaagaattgtca

SEQ ID NO: 276809 - DNA, 25 bp, Probe sequence
ctgagtatagagactattttgaacc

SEQ ID NO: 276810 - DNA, 25 bp, Probe sequence
gcacttcagaatatggtgtgtttga

SEQ ID NO: 276811 - DNA, 25 bp, Probe sequence
gaattgtcaaatgttaagaagcaat

SEQ ID NO: 276812 - DNA, 25 bp, Probe sequence
gaattttcaaaagaattgtcaaatg

SEQ ID NO: 276813 - DNA, 25 bp, Probe sequence
gacagtgaattttcaaaagaattgt

SEQ ID NO: 276814 - DNA, 25 bp, Probe sequence
gagtatagagactattttgaaccat

SEQ ID NO: 276815 - DNA, 25 bp, Probe sequence
gtgaattttcaaaagaattgtcaaa

SEQ ID NO: 276816 - DNA, 25 bp, Probe sequence
gtgacagtgaattttcaaaagaatt

SEQ ID NO: 276817 - DNA, 25 bp, Probe sequence
tgagtatagagactattttgaacca

SEQ ID NO: 276818 - DNA, 25 bp, Probe sequence
tgacagtgaattttcaaaagaattg

SEQ ID NO: 276819 - DNA, 25 bp, Probe sequence
tgaattttcaaaagaattgtcaaat

SEQ ID NO: 276820 - DNA, 25 bp, Probe sequence
tcggtaactactactctatttagta

SEQ ID NO: 276821 - DNA, 25 bp, Probe sequence
taaacaaaagtgacagtgaattttc

SEQ ID NO: 276822 - DNA, 25 bp, Probe sequence
tttcggtaactactactctatttag

SEQ ID NO: 276823 - DNA, 25 bp, Probe sequence
ttttcaaaagaattgtcaaatgtta

SEQ ID NO: 276824 - DNA, 25 bp, Probe sequence
ttcggtaactactactctatttagt

SEQ ID NO: 276825 - DNA, 25 bp, Probe sequence
attacgctgctaatacagatacagt

SEQ ID NO: 276826 - DNA, 25 bp, Probe sequence
atcacttactcgtcaagaagcttaa

SEQ ID NO: 276827 - DNA, 25 bp, Probe sequence
atgtggttgaatttgcgaaaaagca

SEQ ID NO: 276828 - DNA, 25 bp, Probe sequence
agtattacgaaccattgattcataa

SEQ ID NO: 276829 - DNA, 25 bp, Probe sequence
agagaaataccaatatacaggcttt

SEQ ID NO: 276830 - DNA, 25 bp, Probe sequence
agaaaaatctacaattacaattcaa

SEQ ID NO: 276831 - DNA, 25 bp, Probe sequence
agcaacattactgctatcaggatgt

SEQ ID NO: 276832 - DNA, 25 bp, Probe sequence
acgctgctaatacagatacagtaac

SEQ ID NO: 276833 - DNA, 25 bp, Probe sequence
aaagaaacaaaatcagtgccagaag

SEQ ID NO: 276834 - DNA, 25 bp, Probe sequence
aaaagaagcaataaacaagacgcaa

SEQ ID NO: 276835 - DNA, 25 bp, Probe sequence
aacattactgctatcaggatgttca

SEQ ID NO: 276836 - DNA, 25 bp, Probe sequence
aagatgtggttgaatttgcgaaaaa

SEQ ID NO: 276837 - DNA, 25 bp, Probe sequence
aatatttttatatcacttactcgtc

SEQ ID NO: 276838 - DNA, 25 bp, Probe sequence
cttactcgtcaagaagcttaaaaga

SEQ ID NO: 276839 - DNA, 25 bp, Probe sequence
gaatatggagtgtatcgtaaagatg

SEQ ID NO: 276840 - DNA, 25 bp, Probe sequence
gaaggaatggaacaagccagaaaag

SEQ ID NO: 276841 - DNA, 25 bp, Probe sequence
gaactgagtgataaactatataatt

SEQ ID NO: 276842 - DNA, 25 bp, Probe sequence
gacaatacagttgatgatgtaattg

SEQ ID NO: 276843 - DNA, 25 bp, Probe sequence
gatgatgtaattgaactgagtgata

SEQ ID NO: 276844 - DNA, 25 bp, Probe sequence
tgttgtaggtagtggaaaaggcgta

SEQ ID NO: 276845 - DNA, 25 bp, Probe sequence
gtaggtagtggaaaaggcgtagaag

SEQ ID NO: 276846 - DNA, 25 bp, Probe sequence
gtaacaacattgtttagtacaaagg

SEQ ID NO: 276847 - DNA, 25 bp, Probe sequence
gtaagtattacgaaccattgattca

SEQ ID NO: 276848 - DNA, 25 bp, Probe sequence
ggaacaagccagaaaagaagtgaat

SEQ ID NO: 276849 - DNA, 25 bp, Probe sequence
tggaaaaggcgtagaagtattcgtg

SEQ ID NO: 276850 - DNA, 25 bp, Probe sequence
tcacttactcgtcaagaagcttaaa

SEQ ID NO: 276851 - DNA, 25 bp, Probe sequence
taagccagaaaaatctacaattaca

SEQ ID NO: 276852 - DNA, 25 bp, Probe sequence
tacagatacagtaacaacattgttt

SEQ ID NO: 276853 - DNA, 25 bp, Probe sequence
taccaataacgaatctaataaagaa

SEQ ID NO: 276854 - DNA, 25 bp, Probe sequence
taggaaagcctactattaatactaa

SEQ ID NO: 276855 - DNA, 25 bp, Probe sequence
tatatcacttactcgtcaagaagct

SEQ ID NO: 276856 - DNA, 25 bp, Probe sequence
tatttttatatcacttactcgtcaa

SEQ ID NO: 276857 - DNA, 25 bp, Probe sequence
ttttatatcacttactcgtcaagaa

SEQ ID NO: 276858 - DNA, 25 bp, Probe sequence
ttacaattcaaataggaaagcctac

SEQ ID NO: 276859 - DNA, 25 bp, Probe sequence
attatgaaccactgattcgaaaaaa

SEQ ID NO: 276860 - DNA, 25 bp, Probe sequence
attacgctgcaaatacagatgctgt

SEQ ID NO: 276861 - DNA, 25 bp, Probe sequence
atattacatactcttctagaagttt

SEQ ID NO: 276862 - DNA, 25 bp, Probe sequence
atacagatgctgttgctacactttt

SEQ ID NO: 276863 - DNA, 25 bp, Probe sequence
ataaatctacaatcacaatacaaat

SEQ ID NO: 276864 - DNA, 25 bp, Probe sequence
atgctgttgctacacttttttctac

SEQ ID NO: 276865 - DNA, 25 bp, Probe sequence
agatgctgttgctacacttttttct

SEQ ID NO: 276866 - DNA, 25 bp, Probe sequence
acagtagatgatgtaatcgaactaa

SEQ ID NO: 276867 - DNA, 25 bp, Probe sequence
acagatgctgttgctacactttttt

SEQ ID NO: 276868 - DNA, 25 bp, Probe sequence
aagtattatgaaccactgattcgaa

SEQ ID NO: 276869 - DNA, 25 bp, Probe sequence
caatacaaatagggaaacccactat

SEQ ID NO: 276870 - DNA, 25 bp, Probe sequence
cagatgctgttgctacacttttttc

SEQ ID NO: 276871 - DNA, 25 bp, Probe sequence
ctgttgctacacttttttctactaa

SEQ ID NO: 276872 - DNA, 25 bp, Probe sequence
cccactattaatactaagaaagcct

SEQ ID NO: 276873 - DNA, 25 bp, Probe sequence
gctgttgctacacttttttctacta

SEQ ID NO: 276874 - DNA, 25 bp, Probe sequence
gctgcaaatacagatgctgttgcta

SEQ ID NO: 276875 - DNA, 25 bp, Probe sequence
gaaggaatggaacgagcaagaaaag

SEQ ID NO: 276876 - DNA, 25 bp, Probe sequence
gaaccactgattcgaaaaaatgata

SEQ ID NO: 276877 - DNA, 25 bp, Probe sequence
gaaagtattatgaaccactgattcg

SEQ ID NO: 276878 - DNA, 25 bp, Probe sequence
gatgatgtaatcgaactaagtgata

SEQ ID NO: 276879 - DNA, 25 bp, Probe sequence
gatgctgttgctacacttttttcta

SEQ ID NO: 276880 - DNA, 25 bp, Probe sequence
gataatcgtccaatagaatatgggg

SEQ ID NO: 276881 - DNA, 25 bp, Probe sequence
gttgctacacttttttctactaaga

SEQ ID NO: 276882 - DNA, 25 bp, Probe sequence
gtattatgaaccactgattcgaaaa

SEQ ID NO: 276883 - DNA, 25 bp, Probe sequence
gtccaatagaatatggggtgcacag

SEQ ID NO: 276884 - DNA, 25 bp, Probe sequence
tgttgctacacttttttctactaag

SEQ ID NO: 276885 - DNA, 25 bp, Probe sequence
tgctgttgctacacttttttctact

SEQ ID NO: 276886 - DNA, 25 bp, Probe sequence
tcacaatacaaatagggaaacccac

SEQ ID NO: 276887 - DNA, 25 bp, Probe sequence
taaaccagataaatctacaatcaca

SEQ ID NO: 276888 - DNA, 25 bp, Probe sequence
tacagatgctgttgctacacttttt

SEQ ID NO: 276889 - DNA, 25 bp, Probe sequence
tacatactcttctagaagtttaaaa

SEQ ID NO: 276890 - DNA, 25 bp, Probe sequence
tacgctgcaaatacagatgctgttg

SEQ ID NO: 276891 - DNA, 25 bp, Probe sequence
tttatattacatactcttctagaag

SEQ ID NO: 276892 - DNA, 25 bp, Probe sequence
tttttatattacatactcttctaga

SEQ ID NO: 276893 - DNA, 25 bp, Probe sequence
attggatcagttttaaccacgacat

SEQ ID NO: 276894 - DNA, 25 bp, Probe sequence
atatgcctcaaaaatctcaagttac

SEQ ID NO: 276895 - DNA, 25 bp, Probe sequence
atactgccaatactgatgcagtttc

SEQ ID NO: 276896 - DNA, 25 bp, Probe sequence
atactgatgcagtttctacactttt

SEQ ID NO: 276897 - DNA, 25 bp, Probe sequence
ataaagacacaaacacagaaacaaa

SEQ ID NO: 276898 - DNA, 25 bp, Probe sequence
atgcctcaaaaatctcaagttacta

SEQ ID NO: 276899 - DNA, 25 bp, Probe sequence
atgcagtttctacacttttttcaac

SEQ ID NO: 276900 - DNA, 25 bp, Probe sequence
actgatgcagtttctacactttttt

SEQ ID NO: 276901 - DNA, 25 bp, Probe sequence
aaagaaggtatgcaacaagctagaa

SEQ ID NO: 276902 - DNA, 25 bp, Probe sequence
aaacccaatatgcctcaaaaatctc

SEQ ID NO: 276903 - DNA, 25 bp, Probe sequence
aacccaatatgcctcaaaaatctca

SEQ ID NO: 276904 - DNA, 25 bp, Probe sequence
caatatgcctcaaaaatctcaagtt

SEQ ID NO: 276905 - DNA, 25 bp, Probe sequence
cagtagatgatgtgattgaattgag

SEQ ID NO: 276906 - DNA, 25 bp, Probe sequence
ctgatgcagtttctacacttttttc

SEQ ID NO: 276907 - DNA, 25 bp, Probe sequence
ctgccaatactgatgcagtttctac

SEQ ID NO: 276908 - DNA, 25 bp, Probe sequence
cccaatatgcctcaaaaatctcaag

SEQ ID NO: 276909 - DNA, 25 bp, Probe sequence
gccaatactgatgcagtttctacac

SEQ ID NO: 276910 - DNA, 25 bp, Probe sequence
gcctcaaaaatctcaagttactatt

SEQ ID NO: 276911 - DNA, 25 bp, Probe sequence
gcagtttctacacttttttcaacta

SEQ ID NO: 276912 - DNA, 25 bp, Probe sequence
gaaggtatgcaacaagctagaaaag

SEQ ID NO: 276913 - DNA, 25 bp, Probe sequence
gaaaaacccaatatgcctcaaaaat

SEQ ID NO: 276914 - DNA, 25 bp, Probe sequence
gatgatgtgattgaattgagtaata

SEQ ID NO: 276915 - DNA, 25 bp, Probe sequence
gatgcagtttctacacttttttcaa

SEQ ID NO: 276916 - DNA, 25 bp, Probe sequence
gatcagttttaaccacgacattaat

SEQ ID NO: 276917 - DNA, 25 bp, Probe sequence
gattatactgccaatactgatgcag

SEQ ID NO: 276918 - DNA, 25 bp, Probe sequence
gttactattcaattaggaaaatcta

SEQ ID NO: 276919 - DNA, 25 bp, Probe sequence
gttagattatactgccaatactgat

SEQ ID NO: 276920 - DNA, 25 bp, Probe sequence
tgatgcagtttctacacttttttca

SEQ ID NO: 276921 - DNA, 25 bp, Probe sequence
tcaaaaatctcaagttactattcaa

SEQ ID NO: 276922 - DNA, 25 bp, Probe sequence
taaaagaaaaacccaatatgcctca

SEQ ID NO: 276923 - DNA, 25 bp, Probe sequence
tactaaaaaaccattttatgacgat

SEQ ID NO: 276924 - DNA, 25 bp, Probe sequence
tactgatgcagtttctacacttttt

SEQ ID NO: 276925 - DNA, 25 bp, Probe sequence
tagattatactgccaatactgatgc

SEQ ID NO: 276926 - DNA, 25 bp, Probe sequence
ttatgacgatataaatccaattgaa

SEQ ID NO: 276927 - DNA, 25 bp, Probe sequence
atttagcactaaagacaattacact

SEQ ID NO: 276928 - DNA, 25 bp, Probe sequence
atagagctcataagcaagagttgga

SEQ ID NO: 276929 - DNA, 25 bp, Probe sequence
atcgataatagagagtgatagctca

SEQ ID NO: 276930 - DNA, 25 bp, Probe sequence
agtaggtacagtgttgagcggcttt

SEQ ID NO: 276931 - DNA, 25 bp, Probe sequence
agacaattacactaaagataataca

SEQ ID NO: 276932 - DNA, 25 bp, Probe sequence
agcactaaagacaattacactaaag

SEQ ID NO: 276933 - DNA, 25 bp, Probe sequence
agcggctttgaatatagagctcata

SEQ ID NO: 276934 - DNA, 25 bp, Probe sequence
cactaaagacaattacactaaagat

SEQ ID NO: 276935 - DNA, 25 bp, Probe sequence
ctttagtaggtacagtgttgagcgg

SEQ ID NO: 276936 - DNA, 25 bp, Probe sequence
ctttgaatatagagctcataagcaa

SEQ ID NO: 276937 - DNA, 25 bp, Probe sequence
cggctttgaatatagagctcataag

SEQ ID NO: 276938 - DNA, 25 bp, Probe sequence
ccatttgacaaatcgataatagaga

SEQ ID NO: 276939 - DNA, 25 bp, Probe sequence
gcggctttgaatatagagctcataa

SEQ ID NO: 276940 - DNA, 25 bp, Probe sequence
gctcataagcaagagttggatagtt

SEQ ID NO: 276941 - DNA, 25 bp, Probe sequence
gaatatagagctcataagcaagagt

SEQ ID NO: 276942 - DNA, 25 bp, Probe sequence
gagcggctttgaatatagagctcat

SEQ ID NO: 276943 - DNA, 25 bp, Probe sequence
gagctcataagcaagagttggatag

SEQ ID NO: 276944 - DNA, 25 bp, Probe sequence
gaggatgataagacttttagtgatg

SEQ ID NO: 276945 - DNA, 25 bp, Probe sequence
gatgataagacttttagtgatggta

SEQ ID NO: 276946 - DNA, 25 bp, Probe sequence
gataagacttttagtgatggtatga

SEQ ID NO: 276947 - DNA, 25 bp, Probe sequence
gttgagcggctttgaatatagagct

SEQ ID NO: 276948 - DNA, 25 bp, Probe sequence
gtaggtacagtgttgagcggctttg

SEQ ID NO: 276949 - DNA, 25 bp, Probe sequence
ggatgataagacttttagtgatggt

SEQ ID NO: 276950 - DNA, 25 bp, Probe sequence
tggatagtttaacagaagttttgaa

SEQ ID NO: 276951 - DNA, 25 bp, Probe sequence
tgttgagcggctttgaatatagagc

SEQ ID NO: 276952 - DNA, 25 bp, Probe sequence
tttagtaggtacagtgttgagcggc

SEQ ID NO: 276953 - DNA, 25 bp, Probe sequence
taagcaagagttggatagtttaaca

SEQ ID NO: 276954 - DNA, 25 bp, Probe sequence
taagacttttagtgatggtatgaaa

SEQ ID NO: 276955 - DNA, 25 bp, Probe sequence
tagtaggtacagtgttgagcggctt

SEQ ID NO: 276956 - DNA, 25 bp, Probe sequence
tagagctcataagcaagagttggat

SEQ ID NO: 276957 - DNA, 25 bp, Probe sequence
tttagcactaaagacaattacacta

SEQ ID NO: 276958 - DNA, 25 bp, Probe sequence
ttagtgatggtatgaaaaactcaaa

SEQ ID NO: 276959 - DNA, 25 bp, Probe sequence
ttagtaggtacagtgttgagcggct

SEQ ID NO: 276960 - DNA, 25 bp, Probe sequence
ttgagcggctttgaatatagagctc

SEQ ID NO: 276961 - DNA, 25 bp, Probe sequence
attatctttcaattgtgtgaggaat

SEQ ID NO: 276962 - DNA, 25 bp, Probe sequence
atagcgccatcagctactaaaacat

SEQ ID NO: 276963 - DNA, 25 bp, Probe sequence
atcagctactaaaacattatctttc

SEQ ID NO: 276964 - DNA, 25 bp, Probe sequence
atgcttctggacaggtgtctaatcc

SEQ ID NO: 276965 - DNA, 25 bp, Probe sequence
atgcgttcaactttatctggatggc

SEQ ID NO: 276966 - DNA, 25 bp, Probe sequence
aggtgtctaatccttcagagtataa

SEQ ID NO: 276967 - DNA, 25 bp, Probe sequence
acaggtgtctaatccttcagagtat

SEQ ID NO: 276968 - DNA, 25 bp, Probe sequence
aacattatctttcaattgtgtgagg

SEQ ID NO: 276969 - DNA, 25 bp, Probe sequence
caactttatctggatggctaagatt

SEQ ID NO: 276970 - DNA, 25 bp, Probe sequence
cagctactaaaacattatctttcaa

SEQ ID NO: 276971 - DNA, 25 bp, Probe sequence
caggtgtctaatccttcagagtata

SEQ ID NO: 276972 - DNA, 25 bp, Probe sequence
cttctggacaggtgtctaatccttc

SEQ ID NO: 276973 - DNA, 25 bp, Probe sequence
ctggatggctaagattatatgcttc

SEQ ID NO: 276974 - DNA, 25 bp, Probe sequence
ctggacaggtgtctaatccttcaga

SEQ ID NO: 276975 - DNA, 25 bp, Probe sequence
cgttcaactttatctggatggctaa

SEQ ID NO: 276976 - DNA, 25 bp, Probe sequence
gccatcagctactaaaacattatct

SEQ ID NO: 276977 - DNA, 25 bp, Probe sequence
gcgccatcagctactaaaacattat

SEQ ID NO: 276978 - DNA, 25 bp, Probe sequence
gcgttcaactttatctggatggcta

SEQ ID NO: 276979 - DNA, 25 bp, Probe sequence
gctactaaaacattatctttcaatt

SEQ ID NO: 276980 - DNA, 25 bp, Probe sequence
gcttctggacaggtgtctaatcctt

SEQ ID NO: 276981 - DNA, 25 bp, Probe sequence
gacaggtgtctaatccttcagagta

SEQ ID NO: 276982 - DNA, 25 bp, Probe sequence
gattatatgcttctggacaggtgtc

SEQ ID NO: 276983 - DNA, 25 bp, Probe sequence
gttcaactttatctggatggctaag

SEQ ID NO: 276984 - DNA, 25 bp, Probe sequence
ggtgtctaatccttcagagtataaa

SEQ ID NO: 276985 - DNA, 25 bp, Probe sequence
ggacaggtgtctaatccttcagagt

SEQ ID NO: 276986 - DNA, 25 bp, Probe sequence
tggacaggtgtctaatccttcagag

SEQ ID NO: 276987 - DNA, 25 bp, Probe sequence
tgtctaatccttcagagtataaaat

SEQ ID NO: 276988 - DNA, 25 bp, Probe sequence
tgcgttcaactttatctggatggct

SEQ ID NO: 276989 - DNA, 25 bp, Probe sequence
tctggacaggtgtctaatccttcag

SEQ ID NO: 276990 - DNA, 25 bp, Probe sequence
taaaacattatctttcaattgtgtg

SEQ ID NO: 276991 - DNA, 25 bp, Probe sequence
tatgcttctggacaggtgtctaatc

SEQ ID NO: 276992 - DNA, 25 bp, Probe sequence
tatatgcttctggacaggtgtctaa

SEQ ID NO: 276993 - DNA, 25 bp, Probe sequence
ttatatgcttctggacaggtgtcta

SEQ ID NO: 276994 - DNA, 25 bp, Probe sequence
ttcaactttatctggatggctaaga

SEQ ID NO: 276995 - DNA, 25 bp, Probe sequence
atattttacaaacccatactgaaat

SEQ ID NO: 276996 - DNA, 25 bp, Probe sequence
atctcgctaaggcaactgcaaaagt

SEQ ID NO: 276997 - DNA, 25 bp, Probe sequence
atgaagatctcgctaaggcaactgc

SEQ ID NO: 276998 - DNA, 25 bp, Probe sequence
atgatttacatactaatcaaacagg

SEQ ID NO: 276999 - DNA, 25 bp, Probe sequence
aggcaactgcaaaagtaagtacact

SEQ ID NO: 277000 - DNA, 25 bp, Probe sequence
agatctcgctaaggcaactgcaaaa

SEQ ID NO: 277001 - DNA, 25 bp, Probe sequence
acccatactgaaattactactgagg

SEQ ID NO: 277002 - DNA, 25 bp, Probe sequence
acaaacccatactgaaattactact

SEQ ID NO: 277003 - DNA, 25 bp, Probe sequence
aaaggttggttatatggttatagtg

SEQ ID NO: 277004 - DNA, 25 bp, Probe sequence
aaacccatactgaaattactactga

SEQ ID NO: 277005 - DNA, 25 bp, Probe sequence
aacccatactgaaattactactgag

SEQ ID NO: 277006 - DNA, 25 bp, Probe sequence
aagatctcgctaaggcaactgcaaa

SEQ ID NO: 277007 - DNA, 25 bp, Probe sequence
aattactactgaggagaaattttca

SEQ ID NO: 277008 - DNA, 25 bp, Probe sequence
caaacccatactgaaattactactg

SEQ ID NO: 277009 - DNA, 25 bp, Probe sequence
cactatctaatgacaactacataga

SEQ ID NO: 277010 - DNA, 25 bp, Probe sequence
catactgaaattactactgaggaga

SEQ ID NO: 277011 - DNA, 25 bp, Probe sequence
ctcgctaaggcaactgcaaaagtaa

SEQ ID NO: 277012 - DNA, 25 bp, Probe sequence
cccatactgaaattactactgagga

SEQ ID NO: 277013 - DNA, 25 bp, Probe sequence
ccatactgaaattactactgaggag

SEQ ID NO: 277014 - DNA, 25 bp, Probe sequence
gaagatctcgctaaggcaactgcaa

SEQ ID NO: 277015 - DNA, 25 bp, Probe sequence
gacaactacatagaatatgatttac

SEQ ID NO: 277016 - DNA, 25 bp, Probe sequence
gagagtgttgaaactaattttgttg

SEQ ID NO: 277017 - DNA, 25 bp, Probe sequence
gagtgttgaaactaattttgttgta

SEQ ID NO: 277018 - DNA, 25 bp, Probe sequence
gatctcgctaaggcaactgcaaaag

SEQ ID NO: 277019 - DNA, 25 bp, Probe sequence
ggttggttatatggttatagtgaaa

SEQ ID NO: 277020 - DNA, 25 bp, Probe sequence
tgaagatctcgctaaggcaactgca

SEQ ID NO: 277021 - DNA, 25 bp, Probe sequence
tctcgctaaggcaactgcaaaagta

SEQ ID NO: 277022 - DNA, 25 bp, Probe sequence
tacaaacccatactgaaattactac

SEQ ID NO: 277023 - DNA, 25 bp, Probe sequence
tactgaaattactactgaggagaaa

SEQ ID NO: 277024 - DNA, 25 bp, Probe sequence
tatgaagatctcgctaaggcaactg

SEQ ID NO: 277025 - DNA, 25 bp, Probe sequence
tattttacaaacccatactgaaatt

SEQ ID NO: 277026 - DNA, 25 bp, Probe sequence
tttacaaacccatactgaaattact

SEQ ID NO: 277027 - DNA, 25 bp, Probe sequence
ttttgttgtaaaagattcggataat

SEQ ID NO: 277028 - DNA, 25 bp, Probe sequence
ttacaaacccatactgaaattacta

SEQ ID NO: 277029 - DNA, 25 bp, Probe sequence
attaacaatgggcggtaaatcagga

SEQ ID NO: 277030 - DNA, 25 bp, Probe sequence
atttttcaatctaatagcaattcaa

SEQ ID NO: 277031 - DNA, 25 bp, Probe sequence
atacacaaagtgctgatgctaggat

SEQ ID NO: 277032 - DNA, 25 bp, Probe sequence
ataacagttgaacatgctcaaatta

SEQ ID NO: 277033 - DNA, 25 bp, Probe sequence
atctaatagcaattcaaacttgatg

SEQ ID NO: 277034 - DNA, 25 bp, Probe sequence
agtgctgatgctaggatgaaagcca

SEQ ID NO: 277035 - DNA, 25 bp, Probe sequence
accgcatcaaaactatttcaataaa

SEQ ID NO: 277036 - DNA, 25 bp, Probe sequence
acatattaacaatgggcggtaaatc

SEQ ID NO: 277037 - DNA, 25 bp, Probe sequence
acacaaagtgctgatgctaggatga

SEQ ID NO: 277038 - DNA, 25 bp, Probe sequence
aaaccgcatcaaaactatttcaata

SEQ ID NO: 277039 - DNA, 25 bp, Probe sequence
aacacattaagcaaaccgcatcaaa

SEQ ID NO: 277040 - DNA, 25 bp, Probe sequence
aagcaaaccgcatcaaaactatttc

SEQ ID NO: 277041 - DNA, 25 bp, Probe sequence
aagcacaaagcttagtagagaacta

SEQ ID NO: 277042 - DNA, 25 bp, Probe sequence
aagatacacaaagtgctgatgctag

SEQ ID NO: 277043 - DNA, 25 bp, Probe sequence
aagttataacagttgaacatgctca

SEQ ID NO: 277044 - DNA, 25 bp, Probe sequence
aatttactgaaattgtatcggaaga

SEQ ID NO: 277045 - DNA, 25 bp, Probe sequence
caaacttgatggagttcaacatatt

SEQ ID NO: 277046 - DNA, 25 bp, Probe sequence
caaagtgctgatgctaggatgaaag

SEQ ID NO: 277047 - DNA, 25 bp, Probe sequence
cacattaagcaaaccgcatcaaaac

SEQ ID NO: 277048 - DNA, 25 bp, Probe sequence
gctgatgctaggatgaaagccaaac

SEQ ID NO: 277049 - DNA, 25 bp, Probe sequence
gctcaaattaatatttttcaatcta

SEQ ID NO: 277050 - DNA, 25 bp, Probe sequence
gcattagtaacagagagtggcgcaa

SEQ ID NO: 277051 - DNA, 25 bp, Probe sequence
gcaaaccgcatcaaaactatttcaa

SEQ ID NO: 277052 - DNA, 25 bp, Probe sequence
gcaattcaaacttgatggagttcaa

SEQ ID NO: 277053 - DNA, 25 bp, Probe sequence
gaacatgctcaaattaatatttttc

SEQ ID NO: 277054 - DNA, 25 bp, Probe sequence
gaaattgtatcggaagagaaagtta

SEQ ID NO: 277055 - DNA, 25 bp, Probe sequence
gatgctaggatgaaagccaaacaaa

SEQ ID NO: 277056 - DNA, 25 bp, Probe sequence
gttaacacattaagcaaaccgcatc

SEQ ID NO: 277057 - DNA, 25 bp, Probe sequence
gttcaacatattaacaatgggcggt

SEQ ID NO: 277058 - DNA, 25 bp, Probe sequence
gtaacagagagtggcgcaaatgata

SEQ ID NO: 277059 - DNA, 25 bp, Probe sequence
ggtttataatggattacaacgctaa

SEQ ID NO: 277060 - DNA, 25 bp, Probe sequence
ggagttcaacatattaacaatgggc

SEQ ID NO: 277061 - DNA, 25 bp, Probe sequence
taggatgaaagccaaacaaaaagtt

SEQ ID NO: 277062 - DNA, 25 bp, Probe sequence
ttaagcaaaccgcatcaaaactatt

SEQ ID NO: 277063 - DNA, 25 bp, Probe sequence
attacatatagcacttcttctaata

SEQ ID NO: 277064 - DNA, 25 bp, Probe sequence
atttactatccccaaaatgatttga

SEQ ID NO: 277065 - DNA, 25 bp, Probe sequence
atgggcgtactttgtgcgacacaat

SEQ ID NO: 277066 - DNA, 25 bp, Probe sequence
agctttatttactatccccaaaatg

SEQ ID NO: 277067 - DNA, 25 bp, Probe sequence
agctttagtgacagagagtggcgtt

SEQ ID NO: 277068 - DNA, 25 bp, Probe sequence
accgcgacaaacgtgctatcagacg

SEQ ID NO: 277069 - DNA, 25 bp, Probe sequence
acgtgctatcagacgtgatcatgtt

SEQ ID NO: 277070 - DNA, 25 bp, Probe sequence
actatccccaaaatgatttgaaggg

SEQ ID NO: 277071 - DNA, 25 bp, Probe sequence
acatatagcacttcttctaataatg

SEQ ID NO: 277072 - DNA, 25 bp, Probe sequence
acagaccgcgacaaacgtgctatca

SEQ ID NO: 277073 - DNA, 25 bp, Probe sequence
aaagatgctatttcgaaagtcaatg

SEQ ID NO: 277074 - DNA, 25 bp, Probe sequence
aaagaagcacaaaacttgattaatg

SEQ ID NO: 277075 - DNA, 25 bp, Probe sequence
aaaaattacatatagcacttcttct

SEQ ID NO: 277076 - DNA, 25 bp, Probe sequence
aagctactgcaaaggtaagtacact

SEQ ID NO: 277077 - DNA, 25 bp, Probe sequence
aagtactagtattaacaatgggcgt

SEQ ID NO: 277078 - DNA, 25 bp, Probe sequence
aatgagttcaaaatacgtaggcggt

SEQ ID NO: 277079 - DNA, 25 bp, Probe sequence
aatgcaaaagctttagtgacagaga

SEQ ID NO: 277080 - DNA, 25 bp, Probe sequence
caatgggcgtactttgtgcgacaca

SEQ ID NO: 277081 - DNA, 25 bp, Probe sequence
caaaatacgtaggcggtaaatcagg

SEQ ID NO: 277082 - DNA, 25 bp, Probe sequence
cagaccgcgacaaacgtgctatcag

SEQ ID NO: 277083 - DNA, 25 bp, Probe sequence
gcgacacaattatggcaaacgaata

SEQ ID NO: 277084 - DNA, 25 bp, Probe sequence
gacaaacgtgctatcagacgtgatc

SEQ ID NO: 277085 - DNA, 25 bp, Probe sequence
gggcgtactttgtgcgacacaatta

SEQ ID NO: 277086 - DNA, 25 bp, Probe sequence
gatttgaagggattaggtggagaac

SEQ ID NO: 277087 - DNA, 25 bp, Probe sequence
gttttagaattatcaatgagttcaa

SEQ ID NO: 277088 - DNA, 25 bp, Probe sequence
gtgacagagagtggcgttaatgata

SEQ ID NO: 277089 - DNA, 25 bp, Probe sequence
ggtggagaacacaacgattacgaaa

SEQ ID NO: 277090 - DNA, 25 bp, Probe sequence
ggcaaacgaataatgcaaaagcttt

SEQ ID NO: 277091 - DNA, 25 bp, Probe sequence
tgaaagctttatttactatccccaa

SEQ ID NO: 277092 - DNA, 25 bp, Probe sequence
tgaagactttgctaaagctactgca

SEQ ID NO: 277093 - DNA, 25 bp, Probe sequence
tagcacttcttctaataatgtttta

SEQ ID NO: 277094 - DNA, 25 bp, Probe sequence
tttactgaagtaacatcggaagaaa

SEQ ID NO: 277095 - DNA, 25 bp, Probe sequence
ttcacagaccgcgacaaacgtgcta

SEQ ID NO: 277096 - DNA, 25 bp, Probe sequence
ttgtgcgacacaattatggcaaacg

SEQ ID NO: 277097 - DNA, 25 bp, Probe sequence
attgcgcattgctcatagaatcagg

SEQ ID NO: 277098 - DNA, 25 bp, Probe sequence
atatctatgctaaaatcacaaattc

SEQ ID NO: 277099 - DNA, 25 bp, Probe sequence
atacaaaaaagacgcctcccataag

SEQ ID NO: 277100 - DNA, 25 bp, Probe sequence
atgtcacgtaccagcatactcaaaa

SEQ ID NO: 277101 - DNA, 25 bp, Probe sequence
acggcataaagatatcaataccact

SEQ ID NO: 277102 - DNA, 25 bp, Probe sequence
actcattcagatacacacattgcgc

SEQ ID NO: 277103 - DNA, 25 bp, Probe sequence
acacacattgcgcattgctcataga

SEQ ID NO: 277104 - DNA, 25 bp, Probe sequence
aaatgtaataaaggtgttgcgtgat

SEQ ID NO: 277105 - DNA, 25 bp, Probe sequence
aaaatatctctacgcactcattcag

SEQ ID NO: 277106 - DNA, 25 bp, Probe sequence
aactgaaagttctatcggtaagatt

SEQ ID NO: 277107 - DNA, 25 bp, Probe sequence
aaggtgttgcgtgattataagataa

SEQ ID NO: 277108 - DNA, 25 bp, Probe sequence
aataccactatgaatatctatgcta

SEQ ID NO: 277109 - DNA, 25 bp, Probe sequence
caaaccattatgtcacgtaccagca

SEQ ID NO: 277110 - DNA, 25 bp, Probe sequence
cagatacacacattgcgcattgctc

SEQ ID NO: 277111 - DNA, 25 bp, Probe sequence
cattatgtcacgtaccagcatactc

SEQ ID NO: 277112 - DNA, 25 bp, Probe sequence
gcctcccataagtttagtcaccaaa

SEQ ID NO: 277113 - DNA, 25 bp, Probe sequence
gcgcattgctcatagaatcaggtgt

SEQ ID NO: 277114 - DNA, 25 bp, Probe sequence
gctcatagaatcaggtgtacacatt

SEQ ID NO: 277115 - DNA, 25 bp, Probe sequence
gaagtggtctgatattgattttgaa

SEQ ID NO: 277116 - DNA, 25 bp, Probe sequence
gaaaacaacacgattagtattacta

SEQ ID NO: 277117 - DNA, 25 bp, Probe sequence
gaaatacaagaacgattacggcata

SEQ ID NO: 277118 - DNA, 25 bp, Probe sequence
gacgcctcccataagtttagtcacc

SEQ ID NO: 277119 - DNA, 25 bp, Probe sequence
gatttccgttgacccaaatgtaata

SEQ ID NO: 277120 - DNA, 25 bp, Probe sequence
gatacacacattgcgcattgctcat

SEQ ID NO: 277121 - DNA, 25 bp, Probe sequence
gtcacgtaccagcatactcaaaaat

SEQ ID NO: 277122 - DNA, 25 bp, Probe sequence
gtaagatttccgttgacccaaatgt

SEQ ID NO: 277123 - DNA, 25 bp, Probe sequence
gtggatacaaaccattatgtcacgt

SEQ ID NO: 277124 - DNA, 25 bp, Probe sequence
tagtcaccaaatggaagacgtctcg

SEQ ID NO: 277125 - DNA, 25 bp, Probe sequence
tctctacgcactcattcagatacac

SEQ ID NO: 277126 - DNA, 25 bp, Probe sequence
tcagatacttccccctaaaactgaa

SEQ ID NO: 277127 - DNA, 25 bp, Probe sequence
tactaaaacatattacaatccaaat

SEQ ID NO: 277128 - DNA, 25 bp, Probe sequence
tactcaaaaatatctctacgcactc

SEQ ID NO: 277129 - DNA, 25 bp, Probe sequence
tatcggtaagatttccgttgaccca

SEQ ID NO: 277130 - DNA, 25 bp, Probe sequence
tacgcactcattcagatacacacat

SEQ ID NO: 277131 - DNA, 25 bp, Probe sequence
attattggcattgaagtggtctgat

SEQ ID NO: 277132 - DNA, 25 bp, Probe sequence
atacatcatgctatagaacgcttta

SEQ ID NO: 277133 - DNA, 25 bp, Probe sequence
ataagcactcattcatttcgtcata

SEQ ID NO: 277134 - DNA, 25 bp, Probe sequence
atcaccattcgccacaaaatagctt

SEQ ID NO: 277135 - DNA, 25 bp, Probe sequence
atggcgctatcgtatatcactagga

SEQ ID NO: 277136 - DNA, 25 bp, Probe sequence
atggcgattatatcgcaccgtccac

SEQ ID NO: 277137 - DNA, 25 bp, Probe sequence
agacgctaaacatcacgctgaaatg

SEQ ID NO: 277138 - DNA, 25 bp, Probe sequence
agaacgcttgcgacacaaagatata

SEQ ID NO: 277139 - DNA, 25 bp, Probe sequence
agcaatatcaaatacttacgccaaa

SEQ ID NO: 277140 - DNA, 25 bp, Probe sequence
aaacgcggaaatacatggcgctatc

SEQ ID NO: 277141 - DNA, 25 bp, Probe sequence
aacaggttgctgacgattggatatc

SEQ ID NO: 277142 - DNA, 25 bp, Probe sequence
aacaccactatgaacatctacgcta

SEQ ID NO: 277143 - DNA, 25 bp, Probe sequence
aatcgaggtgatcaaatggcaagtt

SEQ ID NO: 277144 - DNA, 25 bp, Probe sequence
aatttcagttgatcctcatgtgatt

SEQ ID NO: 277145 - DNA, 25 bp, Probe sequence
aattgccaaaaatcaccattcgcca

SEQ ID NO: 277146 - DNA, 25 bp, Probe sequence
caccgtccacatctacatttaaaca

SEQ ID NO: 277147 - DNA, 25 bp, Probe sequence
gcgcgttacttatagaggctggtgt

SEQ ID NO: 277148 - DNA, 25 bp, Probe sequence
gctatcccctcgtaattaagaaact

SEQ ID NO: 277149 - DNA, 25 bp, Probe sequence
gcatatacaggcatgcgtgcaggtg

SEQ ID NO: 277150 - DNA, 25 bp, Probe sequence
gcatgcgtgcaggtgaattattggc

SEQ ID NO: 277151 - DNA, 25 bp, Probe sequence
gcacgcgagaaagccatacatcatg

SEQ ID NO: 277152 - DNA, 25 bp, Probe sequence
gaatattgcctagcgagggtattaa

SEQ ID NO: 277153 - DNA, 25 bp, Probe sequence
gaggctggtgtgcatattaaggaaa

SEQ ID NO: 277154 - DNA, 25 bp, Probe sequence
gataacaatttcgtttttactgatg

SEQ ID NO: 277155 - DNA, 25 bp, Probe sequence
gtaaactcatggaaaacgtctcaaa

SEQ ID NO: 277156 - DNA, 25 bp, Probe sequence
gtaagtagtgtcagagcacgcgaga

SEQ ID NO: 277157 - DNA, 25 bp, Probe sequence
ggttttaaacgcaaatcagacgcta

SEQ ID NO: 277158 - DNA, 25 bp, Probe sequence
tgttgatagcattgtaacctctaca

SEQ ID NO: 277159 - DNA, 25 bp, Probe sequence
tctacgctaagattacgaactcata

SEQ ID NO: 277160 - DNA, 25 bp, Probe sequence
tcatttcgtcatactcattgcgcgt

SEQ ID NO: 277161 - DNA, 25 bp, Probe sequence
tcatactcattgcgcgttacttata

SEQ ID NO: 277162 - DNA, 25 bp, Probe sequence
tacaaagacttattacaatccgaat

SEQ ID NO: 277163 - DNA, 25 bp, Probe sequence
tacgccaaaaactgaaagctcaatc

SEQ ID NO: 277164 - DNA, 25 bp, Probe sequence
ttactgatgttaacggctatcccct

SEQ ID NO: 277165 - DNA, 25 bp, Probe sequence
attggtttgcgccaaatatttgatg

SEQ ID NO: 277166 - DNA, 25 bp, Probe sequence
attccaatagaagttgattttgaaa

SEQ ID NO: 277167 - DNA, 25 bp, Probe sequence
atatgaatgttattggtttgcgcca

SEQ ID NO: 277168 - DNA, 25 bp, Probe sequence
ataaaatcgttgttattccaataga

SEQ ID NO: 277169 - DNA, 25 bp, Probe sequence
atcgttgttattccaatagaagttg

SEQ ID NO: 277170 - DNA, 25 bp, Probe sequence
atgaatgttattggtttgcgccaaa

SEQ ID NO: 277171 - DNA, 25 bp, Probe sequence
atgttattggtttgcgccaaatatt

SEQ ID NO: 277172 - DNA, 25 bp, Probe sequence
aaatcgttgttattccaatagaagt

SEQ ID NO: 277173 - DNA, 25 bp, Probe sequence
aaaatcgttgttattccaatagaag

SEQ ID NO: 277174 - DNA, 25 bp, Probe sequence
aatgttattggtttgcgccaaatat

SEQ ID NO: 277175 - DNA, 25 bp, Probe sequence
aatcgttgttattccaatagaagtt

SEQ ID NO: 277176 - DNA, 25 bp, Probe sequence
gcgccaaatatttgatgaactcaaa

SEQ ID NO: 277177 - DNA, 25 bp, Probe sequence
gaatgttattggtttgcgccaaata

SEQ ID NO: 277178 - DNA, 25 bp, Probe sequence
gttgttattccaatagaagttgatt

SEQ ID NO: 277179 - DNA, 25 bp, Probe sequence
gttataaaatcgttgttattccaat

SEQ ID NO: 277180 - DNA, 25 bp, Probe sequence
gttattccaatagaagttgattttg

SEQ ID NO: 277181 - DNA, 25 bp, Probe sequence
gttattggtttgcgccaaatatttg

SEQ ID NO: 277182 - DNA, 25 bp, Probe sequence
gtttgcgccaaatatttgatgaact

SEQ ID NO: 277183 - DNA, 25 bp, Probe sequence
ggtttgcgccaaatatttgatgaac

SEQ ID NO: 277184 - DNA, 25 bp, Probe sequence
tggtttgcgccaaatatttgatgaa

SEQ ID NO: 277185 - DNA, 25 bp, Probe sequence
tgttattggtttgcgccaaatattt

SEQ ID NO: 277186 - DNA, 25 bp, Probe sequence
tgaatgttattggtttgcgccaaat

SEQ ID NO: 277187 - DNA, 25 bp, Probe sequence
tgcgccaaatatttgatgaactcaa

SEQ ID NO: 277188 - DNA, 25 bp, Probe sequence
tcgttgttattccaatagaagttga

SEQ ID NO: 277189 - DNA, 25 bp, Probe sequence
taaaatcgttgttattccaatagaa

SEQ ID NO: 277190 - DNA, 25 bp, Probe sequence
tatgaatgttattggtttgcgccaa

SEQ ID NO: 277191 - DNA, 25 bp, Probe sequence
tataaaatcgttgttattccaatag

SEQ ID NO: 277192 - DNA, 25 bp, Probe sequence
ttattggtttgcgccaaatatttga

SEQ ID NO: 277193 - DNA, 25 bp, Probe sequence
tattccaatagaagttgattttgaa

SEQ ID NO: 277194 - DNA, 25 bp, Probe sequence
tattggtttgcgccaaatatttgat

SEQ ID NO: 277195 - DNA, 25 bp, Probe sequence
tttgcgccaaatatttgatgaactc

SEQ ID NO: 277196 - DNA, 25 bp, Probe sequence
ttataaaatcgttgttattccaata

SEQ ID NO: 277197 - DNA, 25 bp, Probe sequence
ttgcgccaaatatttgatgaactca

SEQ ID NO: 277198 - DNA, 25 bp, Probe sequence
ttggtttgcgccaaatatttgatga

SEQ ID NO: 277199 - DNA, 25 bp, Probe sequence
attttatcccgaccaattggcaatt

SEQ ID NO: 277200 - DNA, 25 bp, Probe sequence
atagcaagattgcatatgtagttga

SEQ ID NO: 277201 - DNA, 25 bp, Probe sequence
atacattggaaacgtttaagaactg

SEQ ID NO: 277202 - DNA, 25 bp, Probe sequence
atcgaccaactcattgacgcataca

SEQ ID NO: 277203 - DNA, 25 bp, Probe sequence
atcccgaccaattggcaattgtaat

SEQ ID NO: 277204 - DNA, 25 bp, Probe sequence
agaattttatcccgaccaattggca

SEQ ID NO: 277205 - DNA, 25 bp, Probe sequence
acgatagaataccgacgctgaactt

SEQ ID NO: 277206 - DNA, 25 bp, Probe sequence
aagaatttgctcaagacgcagttgt

SEQ ID NO: 277207 - DNA, 25 bp, Probe sequence
aagaagcgattgaatcaagttttaa

SEQ ID NO: 277208 - DNA, 25 bp, Probe sequence
aagataaagaatttgctcaagacgc

SEQ ID NO: 277209 - DNA, 25 bp, Probe sequence
aaggaaccacgaaagacaagatgga

SEQ ID NO: 277210 - DNA, 25 bp, Probe sequence
aattttatcccgaccaattggcaat

SEQ ID NO: 277211 - DNA, 25 bp, Probe sequence
aatttgctcaagacgcagttgttag

SEQ ID NO: 277212 - DNA, 25 bp, Probe sequence
caaagaattttatcccgaccaattg

SEQ ID NO: 277213 - DNA, 25 bp, Probe sequence
ctatcgaccaactcattgacgcata

SEQ ID NO: 277214 - DNA, 25 bp, Probe sequence
cgatagaataccgacgctgaactta

SEQ ID NO: 277215 - DNA, 25 bp, Probe sequence
cgaccaactcattgacgcatacaaa

SEQ ID NO: 277216 - DNA, 25 bp, Probe sequence
cgacgatagaataccgacgctgaac

SEQ ID NO: 277217 - DNA, 25 bp, Probe sequence
ccaactcattgacgcatacaaaaag

SEQ ID NO: 277218 - DNA, 25 bp, Probe sequence
gcatatgtagttgaattctttgaat

SEQ ID NO: 277219 - DNA, 25 bp, Probe sequence
gaattttatcccgaccaattggcaa

SEQ ID NO: 277220 - DNA, 25 bp, Probe sequence
gaattctttgaatggtttaatacat

SEQ ID NO: 277221 - DNA, 25 bp, Probe sequence
gaatttgctcaagacgcagttgtta

SEQ ID NO: 277222 - DNA, 25 bp, Probe sequence
gaatggtttaatacattggaaacgt

SEQ ID NO: 277223 - DNA, 25 bp, Probe sequence
gacgatagaataccgacgctgaact

SEQ ID NO: 277224 - DNA, 25 bp, Probe sequence
gaccaactcattgacgcatacaaaa

SEQ ID NO: 277225 - DNA, 25 bp, Probe sequence
gattgcatatgtagttgaattcttt

SEQ ID NO: 277226 - DNA, 25 bp, Probe sequence
gtagttgaattctttgaatggttta

SEQ ID NO: 277227 - DNA, 25 bp, Probe sequence
tcgaccaactcattgacgcatacaa

SEQ ID NO: 277228 - DNA, 25 bp, Probe sequence
tatcgaccaactcattgacgcatac

SEQ ID NO: 277229 - DNA, 25 bp, Probe sequence
tttatcccgaccaattggcaattgt

SEQ ID NO: 277230 - DNA, 25 bp, Probe sequence
ttttatcccgaccaattggcaattg

SEQ ID NO: 277231 - DNA, 25 bp, Probe sequence
ttatcccgaccaattggcaattgta

SEQ ID NO: 277232 - DNA, 25 bp, Probe sequence
ttcaaagaattttatcccgaccaat

SEQ ID NO: 277233 - DNA, 25 bp, Probe sequence
gcgttgcgcaacctggttggggtcc

SEQ ID NO: 277234 - DNA, 25 bp, Probe sequence
attgtcgttttcccgtcaaagtatg

SEQ ID NO: 277235 - DNA, 25 bp, Probe sequence
atatcgctaagtatttaagacatgc

SEQ ID NO: 277236 - DNA, 25 bp, Probe sequence
atgacttgtattctaaattaatagc

SEQ ID NO: 277237 - DNA, 25 bp, Probe sequence
atggttataacgatcctggagcagt

SEQ ID NO: 277238 - DNA, 25 bp, Probe sequence
aaaaattatgcttgtagccggtcat

SEQ ID NO: 277239 - DNA, 25 bp, Probe sequence
aaccaaaaaaatccaccagtgccag

SEQ ID NO: 277240 - DNA, 25 bp, Probe sequence
aagtcaattcaatgcagatactatt

SEQ ID NO: 277241 - DNA, 25 bp, Probe sequence
aattatgcttgtagccggtcatggt

SEQ ID NO: 277242 - DNA, 25 bp, Probe sequence
caaaaaaatccaccagtgccagcag

SEQ ID NO: 277243 - DNA, 25 bp, Probe sequence
cgtcaaagtatggtggcggagctgg

SEQ ID NO: 277244 - DNA, 25 bp, Probe sequence
cggtcatggttataacgatcctgga

SEQ ID NO: 277245 - DNA, 25 bp, Probe sequence
gcctataggtggtttggtagctggt

SEQ ID NO: 277246 - DNA, 25 bp, Probe sequence
gccggtcatggttataacgatcctg

SEQ ID NO: 277247 - DNA, 25 bp, Probe sequence
gcgattcatggtaagcctataggtg

SEQ ID NO: 277248 - DNA, 25 bp, Probe sequence
gctaatagtggacaacgtcgttata

SEQ ID NO: 277249 - DNA, 25 bp, Probe sequence
gcttgtagccggtcatggttataac

SEQ ID NO: 277250 - DNA, 25 bp, Probe sequence
gattcatggtaagcctataggtggt

SEQ ID NO: 277251 - DNA, 25 bp, Probe sequence
gttttcccgtcaaagtatggtggcg

SEQ ID NO: 277252 - DNA, 25 bp, Probe sequence
gtaagcctataggtggtttggtagc

SEQ ID NO: 277253 - DNA, 25 bp, Probe sequence
gtagccggtcatggttataacgatc

SEQ ID NO: 277254 - DNA, 25 bp, Probe sequence
gtcatggttataacgatcctggagc

SEQ ID NO: 277255 - DNA, 25 bp, Probe sequence
gtcgttttcccgtcaaagtatggtg

SEQ ID NO: 277256 - DNA, 25 bp, Probe sequence
gtggtttggtagctggtaatgttaa

SEQ ID NO: 277257 - DNA, 25 bp, Probe sequence
ggtgcgattcatggtaagcctatag

SEQ ID NO: 277258 - DNA, 25 bp, Probe sequence
tggcgttgcgcaacctggttggggt

SEQ ID NO: 277259 - DNA, 25 bp, Probe sequence
tggtagctggtaatgttaaaacatc

SEQ ID NO: 277260 - DNA, 25 bp, Probe sequence
tgtcgttttcccgtcaaagtatggt

SEQ ID NO: 277261 - DNA, 25 bp, Probe sequence
tcgctaagtatttaagacatgcagg

SEQ ID NO: 277262 - DNA, 25 bp, Probe sequence
tttcccgtcaaagtatggtggcgga

SEQ ID NO: 277263 - DNA, 25 bp, Probe sequence
tcgtttatctgaattaggttttatt

SEQ ID NO: 277264 - DNA, 25 bp, Probe sequence
taggtggtttggtagctggtaatgt

SEQ ID NO: 277265 - DNA, 25 bp, Probe sequence
tatgcttgtagccggtcatggttat

SEQ ID NO: 277266 - DNA, 25 bp, Probe sequence
ttatctgaattaggttttattacta

SEQ ID NO: 277267 - DNA, 25 bp, Probe sequence
attccatctctatatagagcagttc

SEQ ID NO: 277268 - DNA, 25 bp, Probe sequence
atcatgagagacgtattcacaataa

SEQ ID NO: 277269 - DNA, 25 bp, Probe sequence
atcagatgacgcaaagaattcaata

SEQ ID NO: 277270 - DNA, 25 bp, Probe sequence
atcatctgagaactttggcgaggaa

SEQ ID NO: 277271 - DNA, 25 bp, Probe sequence
atctgagaactttggcgaggaatca

SEQ ID NO: 277272 - DNA, 25 bp, Probe sequence
atgtttgatttattccatctctata

SEQ ID NO: 277273 - DNA, 25 bp, Probe sequence
agcatcatctgagaactttggcgag

SEQ ID NO: 277274 - DNA, 25 bp, Probe sequence
aaatgtttgatttattccatctcta

SEQ ID NO: 277275 - DNA, 25 bp, Probe sequence
aactttggcgaggaatcagatgacg

SEQ ID NO: 277276 - DNA, 25 bp, Probe sequence
aagcatcatctgagaactttggcga

SEQ ID NO: 277277 - DNA, 25 bp, Probe sequence
aatgtttgatttattccatctctat

SEQ ID NO: 277278 - DNA, 25 bp, Probe sequence
catcatctgagaactttggcgagga

SEQ ID NO: 277279 - DNA, 25 bp, Probe sequence
catctgagaactttggcgaggaatc

SEQ ID NO: 277280 - DNA, 25 bp, Probe sequence
gcatcatctgagaactttggcgagg

SEQ ID NO: 277281 - DNA, 25 bp, Probe sequence
gaattcaataaaagtagcagagtaa

SEQ ID NO: 277282 - DNA, 25 bp, Probe sequence
gaactttggcgaggaatcagatgac

SEQ ID NO: 277283 - DNA, 25 bp, Probe sequence
gaaaaagcatcatctgagaactttg

SEQ ID NO: 277284 - DNA, 25 bp, Probe sequence
gacgtattcacaataatcaaatgtt

SEQ ID NO: 277285 - DNA, 25 bp, Probe sequence
gagaactttggcgaggaatcagatg

SEQ ID NO: 277286 - DNA, 25 bp, Probe sequence
gagagacgtattcacaataatcaaa

SEQ ID NO: 277287 - DNA, 25 bp, Probe sequence
gaggaatcagatgacgcaaagaatt

SEQ ID NO: 277288 - DNA, 25 bp, Probe sequence
gatttattccatctctatatagagc

SEQ ID NO: 277289 - DNA, 25 bp, Probe sequence
gtttgatttattccatctctatata

SEQ ID NO: 277290 - DNA, 25 bp, Probe sequence
gtattcacaataatcaaatgtttga

SEQ ID NO: 277291 - DNA, 25 bp, Probe sequence
ggcgaggaatcagatgacgcaaaga

SEQ ID NO: 277292 - DNA, 25 bp, Probe sequence
tgtttgatttattccatctctatat

SEQ ID NO: 277293 - DNA, 25 bp, Probe sequence
tccatctctatatagagcagttcga

SEQ ID NO: 277294 - DNA, 25 bp, Probe sequence
tctctatatagagcagttcgataat

SEQ ID NO: 277295 - DNA, 25 bp, Probe sequence
tcatctgagaactttggcgaggaat

SEQ ID NO: 277296 - DNA, 25 bp, Probe sequence
tatagagcagttcgataatattatc

SEQ ID NO: 277297 - DNA, 25 bp, Probe sequence
tttggcgaggaatcagatgacgcaa

SEQ ID NO: 277298 - DNA, 25 bp, Probe sequence
ttatcatgagagacgtattcacaat

SEQ ID NO: 277299 - DNA, 25 bp, Probe sequence
ttcttatcatgagagacgtattcac

SEQ ID NO: 277300 - DNA, 25 bp, Probe sequence
ttgatttattccatctctatataga

SEQ ID NO: 277301 - DNA, 25 bp, Probe sequence
attaatttttctgctagctatttag

SEQ ID NO: 277302 - DNA, 25 bp, Probe sequence
atttttctgctagctatttagaaca

SEQ ID NO: 277303 - DNA, 25 bp, Probe sequence
atttagaacatcgtatacaaaatga

SEQ ID NO: 277304 - DNA, 25 bp, Probe sequence
atattaatttttctgctagctattt

SEQ ID NO: 277305 - DNA, 25 bp, Probe sequence
atgaacatacagttgagttattaca

SEQ ID NO: 277306 - DNA, 25 bp, Probe sequence
agaacatcgtatacaaaatgaacat

SEQ ID NO: 277307 - DNA, 25 bp, Probe sequence
agctatttagaacatcgtatacaaa

SEQ ID NO: 277308 - DNA, 25 bp, Probe sequence
acatattaatttttctgctagctat

SEQ ID NO: 277309 - DNA, 25 bp, Probe sequence
aacatcgtatacaaaatgaacatac

SEQ ID NO: 277310 - DNA, 25 bp, Probe sequence
aacatattaatttttctgctagcta

SEQ ID NO: 277311 - DNA, 25 bp, Probe sequence
aatttttctgctagctatttagaac

SEQ ID NO: 277312 - DNA, 25 bp, Probe sequence
catattaatttttctgctagctatt

SEQ ID NO: 277313 - DNA, 25 bp, Probe sequence
ctatttagaacatcgtatacaaaat

SEQ ID NO: 277314 - DNA, 25 bp, Probe sequence
ctagctatttagaacatcgtataca

SEQ ID NO: 277315 - DNA, 25 bp, Probe sequence
ctgctagctatttagaacatcgtat

SEQ ID NO: 277316 - DNA, 25 bp, Probe sequence
gctagctatttagaacatcgtatac

SEQ ID NO: 277317 - DNA, 25 bp, Probe sequence
gctatttagaacatcgtatacaaaa

SEQ ID NO: 277318 - DNA, 25 bp, Probe sequence
gaacatattaatttttctgctagct

SEQ ID NO: 277319 - DNA, 25 bp, Probe sequence
gaacatcgtatacaaaatgaacata

SEQ ID NO: 277320 - DNA, 25 bp, Probe sequence
ggaacatattaatttttctgctagc

SEQ ID NO: 277321 - DNA, 25 bp, Probe sequence
tgctagctatttagaacatcgtata

SEQ ID NO: 277322 - DNA, 25 bp, Probe sequence
tctgctagctatttagaacatcgta

SEQ ID NO: 277323 - DNA, 25 bp, Probe sequence
taatttttctgctagctatttagaa

SEQ ID NO: 277324 - DNA, 25 bp, Probe sequence
tagctatttagaacatcgtatacaa

SEQ ID NO: 277325 - DNA, 25 bp, Probe sequence
tagaacatcgtatacaaaatgaaca

SEQ ID NO: 277326 - DNA, 25 bp, Probe sequence
tatttagaacatcgtatacaaaatg

SEQ ID NO: 277327 - DNA, 25 bp, Probe sequence
tattaatttttctgctagctattta

SEQ ID NO: 277328 - DNA, 25 bp, Probe sequence
tttctgctagctatttagaacatcg

SEQ ID NO: 277329 - DNA, 25 bp, Probe sequence
tttagaacatcgtatacaaaatgaa

SEQ ID NO: 277330 - DNA, 25 bp, Probe sequence
tttttctgctagctatttagaacat

SEQ ID NO: 277331 - DNA, 25 bp, Probe sequence
ttttctgctagctatttagaacatc

SEQ ID NO: 277332 - DNA, 25 bp, Probe sequence
ttagaacatcgtatacaaaatgaac

SEQ ID NO: 277333 - DNA, 25 bp, Probe sequence
ttaatttttctgctagctatttaga

SEQ ID NO: 277334 - DNA, 25 bp, Probe sequence
ttctgctagctatttagaacatcgt

SEQ ID NO: 277335 - DNA, 25 bp, Probe sequence
atggggattaccagcaaacagaaat

SEQ ID NO: 277336 - DNA, 25 bp, Probe sequence
agaacatggaatggttctgccccac

SEQ ID NO: 277337 - DNA, 25 bp, Probe sequence
agaattggctaggcggtggctggac

SEQ ID NO: 277338 - DNA, 25 bp, Probe sequence
actttccaagaatgcgctagattgt

SEQ ID NO: 277339 - DNA, 25 bp, Probe sequence
aagaaagtgctagattcacaaacgg

SEQ ID NO: 277340 - DNA, 25 bp, Probe sequence
aagatgtggttaaaggttatgacct

SEQ ID NO: 277341 - DNA, 25 bp, Probe sequence
aagttacaagacgacaacatgctta

SEQ ID NO: 277342 - DNA, 25 bp, Probe sequence
aatgctttgattatgccaatgctgg

SEQ ID NO: 277343 - DNA, 25 bp, Probe sequence
aatatggtacttactacatggaaga

SEQ ID NO: 277344 - DNA, 25 bp, Probe sequence
cacactggttttgacccagtaactc

SEQ ID NO: 277345 - DNA, 25 bp, Probe sequence
caagtaatacagttaaaccagttgc

SEQ ID NO: 277346 - DNA, 25 bp, Probe sequence
catgggaggggcaacgttattactt

SEQ ID NO: 277347 - DNA, 25 bp, Probe sequence
gctggttggaaagttttgtttggat

SEQ ID NO: 277348 - DNA, 25 bp, Probe sequence
gctactgtataccaaaatacaccgg

SEQ ID NO: 277349 - DNA, 25 bp, Probe sequence
gcatgggtaattgaagcaactttag

SEQ ID NO: 277350 - DNA, 25 bp, Probe sequence
gaatcgaacaacccggctggggttg

SEQ ID NO: 277351 - DNA, 25 bp, Probe sequence
gcacctttatcaagattagaagcgg

SEQ ID NO: 277352 - DNA, 25 bp, Probe sequence
gaatgcgctagattgttgaaaaaat

SEQ ID NO: 277353 - DNA, 25 bp, Probe sequence
gaagtgatgttacaagatggtcatg

SEQ ID NO: 277354 - DNA, 25 bp, Probe sequence
gaaacagctaagccacaacctaaag

SEQ ID NO: 277355 - DNA, 25 bp, Probe sequence
gagtcaagcgcttcaagtaatacag

SEQ ID NO: 277356 - DNA, 25 bp, Probe sequence
gatggtcatgtttgggtaggatata

SEQ ID NO: 277357 - DNA, 25 bp, Probe sequence
gatttccctatgtggtttatccgtc

SEQ ID NO: 277358 - DNA, 25 bp, Probe sequence
gatattaggtgacttatggggagaa

SEQ ID NO: 277359 - DNA, 25 bp, Probe sequence
gattatgccaatgctggttggaaag

SEQ ID NO: 277360 - DNA, 25 bp, Probe sequence
gttctgccccacctaatcagatatt

SEQ ID NO: 277361 - DNA, 25 bp, Probe sequence
gttgccactgtctctaatgagtcaa

SEQ ID NO: 277362 - DNA, 25 bp, Probe sequence
gtaggatatacatgggaggggcaac

SEQ ID NO: 277363 - DNA, 25 bp, Probe sequence
gtctctaatgagtcaagcgcttcaa

SEQ ID NO: 277364 - DNA, 25 bp, Probe sequence
gggaaaacaattcaatgtggactta

SEQ ID NO: 277365 - DNA, 25 bp, Probe sequence
ggggcaacgttattacttgcctatt

SEQ ID NO: 277366 - DNA, 25 bp, Probe sequence
tgtggacttatggtatggatttcaa

SEQ ID NO: 277367 - DNA, 25 bp, Probe sequence
tatggtatggatttcaatgctttga

SEQ ID NO: 277368 - DNA, 25 bp, Probe sequence
tattacttgcctattagaacatgga

SEQ ID NO: 277369 - DNA, 25 bp, Probe sequence
taacggaggcgctcaaaggttccct

SEQ ID NO: 277370 - DNA, 25 bp, Probe sequence
tgtcgggtaagttccgacccgcacg

SEQ ID NO: 277371 - DNA, 25 bp, Probe sequence
aacgtcgtgagacagttcggtccct

SEQ ID NO: 277372 - DNA, 25 bp, Probe sequence
atcccgtccaccgattgactaaggt

SEQ ID NO: 277373 - DNA, 25 bp, Probe sequence
atattcctgtaccacctataatcgt

SEQ ID NO: 277374 - DNA, 25 bp, Probe sequence
aagggagcttgactgcgagacctac

SEQ ID NO: 277375 - DNA, 25 bp, Probe sequence
gctgaggccgacaggcgtaggcgat

SEQ ID NO: 277376 - DNA, 25 bp, Probe sequence
agagcactgtttggacgaggggccc

SEQ ID NO: 277377 - DNA, 25 bp, Probe sequence
gaaaccaggtgatctacccttggtc

SEQ ID NO: 277378 - DNA, 25 bp, Probe sequence
aaagcatctaagcatgaagcccccc

SEQ ID NO: 277379 - DNA, 25 bp, Probe sequence
gaaagaccccgtggagctttactgt

SEQ ID NO: 277380 - DNA, 25 bp, Probe sequence
aacgatttgggcactgtctcaacga

SEQ ID NO: 277381 - DNA, 25 bp, Probe sequence
gaatggaggaccgaaccgacttacg

SEQ ID NO: 277382 - DNA, 25 bp, Probe sequence
ctagctgtgttggctttctaacccg

SEQ ID NO: 277383 - DNA, 25 bp, Probe sequence
tccagaggaaggctcgtccgctctg

SEQ ID NO: 277384 - DNA, 25 bp, Probe sequence
gcgctggtgggatactaccctagct

SEQ ID NO: 277385 - DNA, 25 bp, Probe sequence
gaataggcccaagcgactgtttatc

SEQ ID NO: 277386 - DNA, 25 bp, Probe sequence
gaacctgaaaccgtgtgcttacaag

SEQ ID NO: 277387 - DNA, 25 bp, Probe sequence
gacttagtgatccggtggttccgca

SEQ ID NO: 277388 - DNA, 25 bp, Probe sequence
gatgagatttcccaacttcggttat

SEQ ID NO: 277389 - DNA, 25 bp, Probe sequence
gatagctggttctctccgaaatagc

SEQ ID NO: 277390 - DNA, 25 bp, Probe sequence
gttgtctctcttgagtggatcctga

SEQ ID NO: 277391 - DNA, 25 bp, Probe sequence
gttagtcgggtcctaagctgaggcc

SEQ ID NO: 277392 - DNA, 25 bp, Probe sequence
ggctgttcgcccattaaagcggtac

SEQ ID NO: 277393 - DNA, 25 bp, Probe sequence
ggaccgggatggacatacctctggt

SEQ ID NO: 277394 - DNA, 25 bp, Probe sequence
tcgaagccccagtaaacggcggccg

SEQ ID NO: 277395 - DNA, 25 bp, Probe sequence
ggcacacccggagaactgaaacatc

SEQ ID NO: 277396 - DNA, 25 bp, Probe sequence
ggcaaatccggtactcgttaaggct

SEQ ID NO: 277397 - DNA, 25 bp, Probe sequence
tctaacccgcaccacttatcgtggt

SEQ ID NO: 277398 - DNA, 25 bp, Probe sequence
tgaagatgcaggttacccgcgacag

SEQ ID NO: 277399 - DNA, 25 bp, Probe sequence
tctggtgtaccagttgtcgtgccaa

SEQ ID NO: 277400 - DNA, 25 bp, Probe sequence
tcgagtcgttgatttcacactgccg

SEQ ID NO: 277401 - DNA, 25 bp, Probe sequence
tcgattcccttagtagcggcgagcg

SEQ ID NO: 277402 - DNA, 25 bp, Probe sequence
ttaacgcccagaagagccgcagtga

SEQ ID NO: 277403 - DNA, 25 bp, Probe sequence
attcattttaaaaggtcatatgggc

SEQ ID NO: 277404 - DNA, 25 bp, Probe sequence
attcatgttaacggattcgatttta

SEQ ID NO: 277405 - DNA, 25 bp, Probe sequence
atattcatgttaacggattcgattt

SEQ ID NO: 277406 - DNA, 25 bp, Probe sequence
atcatacgcaaaaatattcatgtta

SEQ ID NO: 277407 - DNA, 25 bp, Probe sequence
atgcttatgtcgtagatgagaatga

SEQ ID NO: 277408 - DNA, 25 bp, Probe sequence
atgacttagatatggcatcagactt

SEQ ID NO: 277409 - DNA, 25 bp, Probe sequence
accaattaaacatgcttatgtcgta

SEQ ID NO: 277410 - DNA, 25 bp, Probe sequence
acttagatatggcatcagacttatt

SEQ ID NO: 277411 - DNA, 25 bp, Probe sequence
acatgcttatgtcgtagatgagaat

SEQ ID NO: 277412 - DNA, 25 bp, Probe sequence
aaatttctcggtattgatgacgaca

SEQ ID NO: 277413 - DNA, 25 bp, Probe sequence
aaatattcatgttaacggattcgat

SEQ ID NO: 277414 - DNA, 25 bp, Probe sequence
aaacaatgtattacgaaataggcga

SEQ ID NO: 277415 - DNA, 25 bp, Probe sequence
aaaatttctcggtattgatgacgac

SEQ ID NO: 277416 - DNA, 25 bp, Probe sequence
aacatgcttatgtcgtagatgagaa

SEQ ID NO: 277417 - DNA, 25 bp, Probe sequence
aaggtcatatgggcatatcaataca

SEQ ID NO: 277418 - DNA, 25 bp, Probe sequence
aatcacaaaaatttctcggtattga

SEQ ID NO: 277419 - DNA, 25 bp, Probe sequence
aatattcatgttaacggattcgatt

SEQ ID NO: 277420 - DNA, 25 bp, Probe sequence
aatttctcggtattgatgacgacaa

SEQ ID NO: 277421 - DNA, 25 bp, Probe sequence
aattaaacatgcttatgtcgtagat

SEQ ID NO: 277422 - DNA, 25 bp, Probe sequence
caaaaatttctcggtattgatgacg

SEQ ID NO: 277423 - DNA, 25 bp, Probe sequence
cacaaaaatttctcggtattgatga

SEQ ID NO: 277424 - DNA, 25 bp, Probe sequence
catatgggcatatcaatacaagtta

SEQ ID NO: 277425 - DNA, 25 bp, Probe sequence
gcttatgtcgtagatgagaatgact

SEQ ID NO: 277426 - DNA, 25 bp, Probe sequence
gaatgacttagatatggcatcagac

SEQ ID NO: 277427 - DNA, 25 bp, Probe sequence
gacttagatatggcatcagacttat

SEQ ID NO: 277428 - DNA, 25 bp, Probe sequence
gagaatgacttagatatggcatcag

SEQ ID NO: 277429 - DNA, 25 bp, Probe sequence
gtaccaattaaacatgcttatgtcg

SEQ ID NO: 277430 - DNA, 25 bp, Probe sequence
tgggcatatcaatacaagttaaaga

SEQ ID NO: 277431 - DNA, 25 bp, Probe sequence
tgacttagatatggcatcagactta

SEQ ID NO: 277432 - DNA, 25 bp, Probe sequence
taaacatgcttatgtcgtagatgag

SEQ ID NO: 277433 - DNA, 25 bp, Probe sequence
tacgcaaaaatattcatgttaacgg

SEQ ID NO: 277434 - DNA, 25 bp, Probe sequence
tatgggcatatcaatacaagttaaa

SEQ ID NO: 277435 - DNA, 25 bp, Probe sequence
tattcatgttaacggattcgatttt

SEQ ID NO: 277436 - DNA, 25 bp, Probe sequence
ttttaaaaggtcatatgggcatatc

SEQ ID NO: 277437 - DNA, 25 bp, Probe sequence
ataacgaggagtgcgaagaggagta

SEQ ID NO: 277438 - DNA, 25 bp, Probe sequence
atcatttcatgtcgtagatttaagc

SEQ ID NO: 277439 - DNA, 25 bp, Probe sequence
aggagtgcgaagaggagtacgaaga

SEQ ID NO: 277440 - DNA, 25 bp, Probe sequence
agtacgaagaatacaaggaggacta

SEQ ID NO: 277441 - DNA, 25 bp, Probe sequence
agtgcgaagaggagtacgaagaata

SEQ ID NO: 277442 - DNA, 25 bp, Probe sequence
agataacgaggagtgcgaagaggag

SEQ ID NO: 277443 - DNA, 25 bp, Probe sequence
acgaggagtgcgaagaggagtacga

SEQ ID NO: 277444 - DNA, 25 bp, Probe sequence
acttaaatcatttcatgtcgtagat

SEQ ID NO: 277445 - DNA, 25 bp, Probe sequence
aaatcatttcatgtcgtagatttaa

SEQ ID NO: 277446 - DNA, 25 bp, Probe sequence
aacgaggagtgcgaagaggagtacg

SEQ ID NO: 277447 - DNA, 25 bp, Probe sequence
aagataacgaggagtgcgaagagga

SEQ ID NO: 277448 - DNA, 25 bp, Probe sequence
aatcatttcatgtcgtagatttaag

SEQ ID NO: 277449 - DNA, 25 bp, Probe sequence
cacttaaatcatttcatgtcgtaga

SEQ ID NO: 277450 - DNA, 25 bp, Probe sequence
cttaaatcatttcatgtcgtagatt

SEQ ID NO: 277451 - DNA, 25 bp, Probe sequence
cgaggagtgcgaagaggagtacgaa

SEQ ID NO: 277452 - DNA, 25 bp, Probe sequence
cgaactatatattgcaatggatgca

SEQ ID NO: 277453 - DNA, 25 bp, Probe sequence
ccacttaaatcatttcatgtcgtag

SEQ ID NO: 277454 - DNA, 25 bp, Probe sequence
gcgaagaggagtacgaagaatacaa

SEQ ID NO: 277455 - DNA, 25 bp, Probe sequence
gaagataacgaggagtgcgaagagg

SEQ ID NO: 277456 - DNA, 25 bp, Probe sequence
gaagaggagtacgaagaatacaagg

SEQ ID NO: 277457 - DNA, 25 bp, Probe sequence
gagtacgaagaatacaaggaggact

SEQ ID NO: 277458 - DNA, 25 bp, Probe sequence
gagtgcgaagaggagtacgaagaat

SEQ ID NO: 277459 - DNA, 25 bp, Probe sequence
gaggagtgcgaagaggagtacgaag

SEQ ID NO: 277460 - DNA, 25 bp, Probe sequence
gaggagtacgaagaatacaaggagg

SEQ ID NO: 277461 - DNA, 25 bp, Probe sequence
gataacgaggagtgcgaagaggagt

SEQ ID NO: 277462 - DNA, 25 bp, Probe sequence
gtgcgaagaggagtacgaagaatac

SEQ ID NO: 277463 - DNA, 25 bp, Probe sequence
ggtatcagtatacaagttaaggata

SEQ ID NO: 277464 - DNA, 25 bp, Probe sequence
ggagtacgaagaatacaaggaggac

SEQ ID NO: 277465 - DNA, 25 bp, Probe sequence
ggagtgcgaagaggagtacgaagaa

SEQ ID NO: 277466 - DNA, 25 bp, Probe sequence
taacgaggagtgcgaagaggagtac

SEQ ID NO: 277467 - DNA, 25 bp, Probe sequence
tcagtatacaagttaaggatatgaa

SEQ ID NO: 277468 - DNA, 25 bp, Probe sequence
taaatcatttcatgtcgtagattta

SEQ ID NO: 277469 - DNA, 25 bp, Probe sequence
tacgaagaatacaaggaggactaaa

SEQ ID NO: 277470 - DNA, 25 bp, Probe sequence
ttaaatcatttcatgtcgtagattt

SEQ ID NO: 277471 - DNA, 25 bp, Probe sequence
attaatgtagacggattcgatttta

SEQ ID NO: 277472 - DNA, 25 bp, Probe sequence
atcgacggtataaatataacagatg

SEQ ID NO: 277473 - DNA, 25 bp, Probe sequence
atgagaatgatctatacacagcatt

SEQ ID NO: 277474 - DNA, 25 bp, Probe sequence
atgatctatacacagcattagacat

SEQ ID NO: 277475 - DNA, 25 bp, Probe sequence
acgaaagagacaggctaattaactt

SEQ ID NO: 277476 - DNA, 25 bp, Probe sequence
acagcattctagtgaatgtcttaga

SEQ ID NO: 277477 - DNA, 25 bp, Probe sequence
acaaaattggcgatgtatgtcaaaa

SEQ ID NO: 277478 - DNA, 25 bp, Probe sequence
acaagattacagcattctagtgaat

SEQ ID NO: 277479 - DNA, 25 bp, Probe sequence
aaattggcgatgtatgtcaaaaagt

SEQ ID NO: 277480 - DNA, 25 bp, Probe sequence
aacaatgtactacaaaattggcgat

SEQ ID NO: 277481 - DNA, 25 bp, Probe sequence
aaacaagattacagcattctagtga

SEQ ID NO: 277482 - DNA, 25 bp, Probe sequence
aacacagacgaaagagacaggctaa

SEQ ID NO: 277483 - DNA, 25 bp, Probe sequence
aatgtactacaaaattggcgatgta

SEQ ID NO: 277484 - DNA, 25 bp, Probe sequence
aattaatgtagacggattcgatttt

SEQ ID NO: 277485 - DNA, 25 bp, Probe sequence
caagattacagcattctagtgaatg

SEQ ID NO: 277486 - DNA, 25 bp, Probe sequence
cacagacgaaagagacaggctaatt

SEQ ID NO: 277487 - DNA, 25 bp, Probe sequence
cattctagtgaatgtcttagattta

SEQ ID NO: 277488 - DNA, 25 bp, Probe sequence
ctagtgaatgtcttagatttagaag

SEQ ID NO: 277489 - DNA, 25 bp, Probe sequence
ctatacacagcattagacatattaa

SEQ ID NO: 277490 - DNA, 25 bp, Probe sequence
gaatgatctatacacagcattagac

SEQ ID NO: 277491 - DNA, 25 bp, Probe sequence
gaagatagatttatcgacggtataa

SEQ ID NO: 277492 - DNA, 25 bp, Probe sequence
gaacacagacgaaagagacaggcta

SEQ ID NO: 277493 - DNA, 25 bp, Probe sequence
gaaacaagattacagcattctagtg

SEQ ID NO: 277494 - DNA, 25 bp, Probe sequence
gacatattaaatcaatctatttatg

SEQ ID NO: 277495 - DNA, 25 bp, Probe sequence
gacgaaagagacaggctaattaact

SEQ ID NO: 277496 - DNA, 25 bp, Probe sequence
gagaatgatctatacacagcattag

SEQ ID NO: 277497 - DNA, 25 bp, Probe sequence
gagaacacagacgaaagagacaggc

SEQ ID NO: 277498 - DNA, 25 bp, Probe sequence
gatctatacacagcattagacatat

SEQ ID NO: 277499 - DNA, 25 bp, Probe sequence
gattacagcattctagtgaatgtct

SEQ ID NO: 277500 - DNA, 25 bp, Probe sequence
gtactacaaaattggcgatgtatgt

SEQ ID NO: 277501 - DNA, 25 bp, Probe sequence
gtaattaatgtagacggattcgatt

SEQ ID NO: 277502 - DNA, 25 bp, Probe sequence
gtgtcaacaatgtactacaaaattg

SEQ ID NO: 277503 - DNA, 25 bp, Probe sequence
ggattcgattttaaattagcagtta

SEQ ID NO: 277504 - DNA, 25 bp, Probe sequence
ggcgatgtatgtcaaaaagtaatta

SEQ ID NO: 277505 - DNA, 25 bp, Probe sequence
ataccggtagagaaaatacacttat

SEQ ID NO: 277506 - DNA, 25 bp, Probe sequence
atgtgttacgactactcacgtttga

SEQ ID NO: 277507 - DNA, 25 bp, Probe sequence
atggcactcagtacaattttgcaat

SEQ ID NO: 277508 - DNA, 25 bp, Probe sequence
acttgagaggaggtgcttttatgtg

SEQ ID NO: 277509 - DNA, 25 bp, Probe sequence
acaactactagatataccggtagag

SEQ ID NO: 277510 - DNA, 25 bp, Probe sequence
aaagtatggcactcagtacaatttt

SEQ ID NO: 277511 - DNA, 25 bp, Probe sequence
aagttggttggaaagacagtgaaat

SEQ ID NO: 277512 - DNA, 25 bp, Probe sequence
aatatggaaagctatacaactacta

SEQ ID NO: 277513 - DNA, 25 bp, Probe sequence
aattgctatgaaattgtcagagaga

SEQ ID NO: 277514 - DNA, 25 bp, Probe sequence
gctatacaactactagatataccgg

SEQ ID NO: 277515 - DNA, 25 bp, Probe sequence
gcttttatgtgttacgactactcac

SEQ ID NO: 277516 - DNA, 25 bp, Probe sequence
gaacttgagaggaggtgcttttatg

SEQ ID NO: 277517 - DNA, 25 bp, Probe sequence
gaaaagtatggcactcagtacaatt

SEQ ID NO: 277518 - DNA, 25 bp, Probe sequence
gacagtgaaatatggaaagctatac

SEQ ID NO: 277519 - DNA, 25 bp, Probe sequence
gagaggaggtgcttttatgtgttac

SEQ ID NO: 277520 - DNA, 25 bp, Probe sequence
gaggtgcttttatgtgttacgacta

SEQ ID NO: 277521 - DNA, 25 bp, Probe sequence
gaggaggtgcttttatgtgttacga

SEQ ID NO: 277522 - DNA, 25 bp, Probe sequence
gtatggcactcagtacaattttgca

SEQ ID NO: 277523 - DNA, 25 bp, Probe sequence
gtagaaaagtatggcactcagtaca

SEQ ID NO: 277524 - DNA, 25 bp, Probe sequence
gtgcttttatgtgttacgactactc

SEQ ID NO: 277525 - DNA, 25 bp, Probe sequence
gtgaacttgagaggaggtgctttta

SEQ ID NO: 277526 - DNA, 25 bp, Probe sequence
ggtgcttttatgtgttacgactact

SEQ ID NO: 277527 - DNA, 25 bp, Probe sequence
ggtaaagttggttggaaagacagtg

SEQ ID NO: 277528 - DNA, 25 bp, Probe sequence
ggaggtgcttttatgtgttacgact

SEQ ID NO: 277529 - DNA, 25 bp, Probe sequence
ggaaagctatacaactactagatat

SEQ ID NO: 277530 - DNA, 25 bp, Probe sequence
ggcactcagtacaattttgcaattg

SEQ ID NO: 277531 - DNA, 25 bp, Probe sequence
tgtgttacgactactcacgtttgag

SEQ ID NO: 277532 - DNA, 25 bp, Probe sequence
tgaaattgtcagagagaagtttatc

SEQ ID NO: 277533 - DNA, 25 bp, Probe sequence
tgcttttatgtgttacgactactca

SEQ ID NO: 277534 - DNA, 25 bp, Probe sequence
tcagtacaattttgcaattgctatg

SEQ ID NO: 277535 - DNA, 25 bp, Probe sequence
tatgtgttacgactactcacgtttg

SEQ ID NO: 277536 - DNA, 25 bp, Probe sequence
tatacaactactagatataccggta

SEQ ID NO: 277537 - DNA, 25 bp, Probe sequence
ttttatgtgttacgactactcacgt

SEQ ID NO: 277538 - DNA, 25 bp, Probe sequence
ttatgtgttacgactactcacgttt

SEQ ID NO: 277539 - DNA, 25 bp, Probe sequence
attggggatatagcgaagttacgag

SEQ ID NO: 277540 - DNA, 25 bp, Probe sequence
attcggtaacgatgatgaaagagtt

SEQ ID NO: 277541 - DNA, 25 bp, Probe sequence
ataaacgaattcggtaacgatgatg

SEQ ID NO: 277542 - DNA, 25 bp, Probe sequence
atatagcgaagttacgagattgtaa

SEQ ID NO: 277543 - DNA, 25 bp, Probe sequence
atagcgaagttacgagattgtaaca

SEQ ID NO: 277544 - DNA, 25 bp, Probe sequence
agattgtaacaaagaactggagaag

SEQ ID NO: 277545 - DNA, 25 bp, Probe sequence
agaactggagaagaaagcaagcgca

SEQ ID NO: 277546 - DNA, 25 bp, Probe sequence
acgaattcggtaacgatgatgaaag

SEQ ID NO: 277547 - DNA, 25 bp, Probe sequence
aaacgaattcggtaacgatgatgaa

SEQ ID NO: 277548 - DNA, 25 bp, Probe sequence
aacgaattcggtaacgatgatgaaa

SEQ ID NO: 277549 - DNA, 25 bp, Probe sequence
aagaactggagaagaaagcaagcgc

SEQ ID NO: 277550 - DNA, 25 bp, Probe sequence
aataaacgaattcggtaacgatgat

SEQ ID NO: 277551 - DNA, 25 bp, Probe sequence
aattcggtaacgatgatgaaagagt

SEQ ID NO: 277552 - DNA, 25 bp, Probe sequence
caatataaaaatctttgtactaact

SEQ ID NO: 277553 - DNA, 25 bp, Probe sequence
cgaattcggtaacgatgatgaaaga

SEQ ID NO: 277554 - DNA, 25 bp, Probe sequence
gcgaagttacgagattgtaacaaag

SEQ ID NO: 277555 - DNA, 25 bp, Probe sequence
gaattcggtaacgatgatgaaagag

SEQ ID NO: 277556 - DNA, 25 bp, Probe sequence
gaactggagaagaaagcaagcgcat

SEQ ID NO: 277557 - DNA, 25 bp, Probe sequence
gaaagagttaaattcggaatggaat

SEQ ID NO: 277558 - DNA, 25 bp, Probe sequence
gagattgtaacaaagaactggagaa

SEQ ID NO: 277559 - DNA, 25 bp, Probe sequence
gatgaaagagttaaattcggaatgg

SEQ ID NO: 277560 - DNA, 25 bp, Probe sequence
gatatagcgaagttacgagattgta

SEQ ID NO: 277561 - DNA, 25 bp, Probe sequence
gattgtaacaaagaactggagaaga

SEQ ID NO: 277562 - DNA, 25 bp, Probe sequence
gggatatagcgaagttacgagattg

SEQ ID NO: 277563 - DNA, 25 bp, Probe sequence
ggggatatagcgaagttacgagatt

SEQ ID NO: 277564 - DNA, 25 bp, Probe sequence
ggatatagcgaagttacgagattgt

SEQ ID NO: 277565 - DNA, 25 bp, Probe sequence
tggggatatagcgaagttacgagat

SEQ ID NO: 277566 - DNA, 25 bp, Probe sequence
taataaacgaattcggtaacgatga

SEQ ID NO: 277567 - DNA, 25 bp, Probe sequence
taaacgaattcggtaacgatgatga

SEQ ID NO: 277568 - DNA, 25 bp, Probe sequence
tacgagattgtaacaaagaactgga

SEQ ID NO: 277569 - DNA, 25 bp, Probe sequence
tagcgaagttacgagattgtaacaa

SEQ ID NO: 277570 - DNA, 25 bp, Probe sequence
tatagcgaagttacgagattgtaac

SEQ ID NO: 277571 - DNA, 25 bp, Probe sequence
ttggggatatagcgaagttacgaga

SEQ ID NO: 277572 - DNA, 25 bp, Probe sequence
tattggggatatagcgaagttacga

SEQ ID NO: 277573 - DNA, 25 bp, Probe sequence
ataggcgtaatggaagctaggttga

SEQ ID NO: 277574 - DNA, 25 bp, Probe sequence
atggaagctaggttgaagaagatga

SEQ ID NO: 277575 - DNA, 25 bp, Probe sequence
aggcgtaatggaagctaggttgaag

SEQ ID NO: 277576 - DNA, 25 bp, Probe sequence
agctaggttgaagaagatgagaaaa

SEQ ID NO: 277577 - DNA, 25 bp, Probe sequence
aaataggcgtaatggaagctaggtt

SEQ ID NO: 277578 - DNA, 25 bp, Probe sequence
aagctaggttgaagaagatgagaaa

SEQ ID NO: 277579 - DNA, 25 bp, Probe sequence
aagaagatgagaaaacaacgtgatg

SEQ ID NO: 277580 - DNA, 25 bp, Probe sequence
aatggaagctaggttgaagaagatg

SEQ ID NO: 277581 - DNA, 25 bp, Probe sequence
aataggcgtaatggaagctaggttg

SEQ ID NO: 277582 - DNA, 25 bp, Probe sequence
caaataggcgtaatggaagctaggt

SEQ ID NO: 277583 - DNA, 25 bp, Probe sequence
cgtaatggaagctaggttgaagaag

SEQ ID NO: 277584 - DNA, 25 bp, Probe sequence
ccaaataggcgtaatggaagctagg

SEQ ID NO: 277585 - DNA, 25 bp, Probe sequence
gcgtaatggaagctaggttgaagaa

SEQ ID NO: 277586 - DNA, 25 bp, Probe sequence
gctaggttgaagaagatgagaaaac

SEQ ID NO: 277587 - DNA, 25 bp, Probe sequence
gaagaagatgagaaaacaacgtgat

SEQ ID NO: 277588 - DNA, 25 bp, Probe sequence
gaagctaggttgaagaagatgagaa

SEQ ID NO: 277589 - DNA, 25 bp, Probe sequence
gtaatggaagctaggttgaagaaga

SEQ ID NO: 277590 - DNA, 25 bp, Probe sequence
ggaagctaggttgaagaagatgaga

SEQ ID NO: 277591 - DNA, 25 bp, Probe sequence
ggcgtaatggaagctaggttgaaga

SEQ ID NO: 277592 - DNA, 25 bp, Probe sequence
tggaagctaggttgaagaagatgag

SEQ ID NO: 277593 - DNA, 25 bp, Probe sequence
taatggaagctaggttgaagaagat

SEQ ID NO: 277594 - DNA, 25 bp, Probe sequence
taggcgtaatggaagctaggttgaa

SEQ ID NO: 277595 - DNA, 25 bp, Probe sequence
ataagacactttagagctcaatcaa

SEQ ID NO: 277596 - DNA, 25 bp, Probe sequence
atcactgatgagcaaagtgcaataa

SEQ ID NO: 277597 - DNA, 25 bp, Probe sequence
atgatacaaccaacaagagaagaat

SEQ ID NO: 277598 - DNA, 25 bp, Probe sequence
atgttgactctatcactgatgagca

SEQ ID NO: 277599 - DNA, 25 bp, Probe sequence
agcttatcgaggatatagctaagtt

SEQ ID NO: 277600 - DNA, 25 bp, Probe sequence
agctgaaaatgttgactctatcact

SEQ ID NO: 277601 - DNA, 25 bp, Probe sequence
acgagatgagcttatcgaggatata

SEQ ID NO: 277602 - DNA, 25 bp, Probe sequence
aaatgttgactctatcactgatgag

SEQ ID NO: 277603 - DNA, 25 bp, Probe sequence
aaaatgttgactctatcactgatga

SEQ ID NO: 277604 - DNA, 25 bp, Probe sequence
aagacactttagagctcaatcaaaa

SEQ ID NO: 277605 - DNA, 25 bp, Probe sequence
aatgttgactctatcactgatgagc

SEQ ID NO: 277606 - DNA, 25 bp, Probe sequence
aataagacactttagagctcaatca

SEQ ID NO: 277607 - DNA, 25 bp, Probe sequence
catggagctgaaaatgttgactcta

SEQ ID NO: 277608 - DNA, 25 bp, Probe sequence
ctctatcactgatgagcaaagtgca

SEQ ID NO: 277609 - DNA, 25 bp, Probe sequence
ctgaaaatgttgactctatcactga

SEQ ID NO: 277610 - DNA, 25 bp, Probe sequence
gctgaaaatgttgactctatcactg

SEQ ID NO: 277611 - DNA, 25 bp, Probe sequence
gcaataagacactttagagctcaat

SEQ ID NO: 277612 - DNA, 25 bp, Probe sequence
gaaaatgttgactctatcactgatg

SEQ ID NO: 277613 - DNA, 25 bp, Probe sequence
gacactttagagctcaatcaaaagt

SEQ ID NO: 277614 - DNA, 25 bp, Probe sequence
gactctatcactgatgagcaaagtg

SEQ ID NO: 277615 - DNA, 25 bp, Probe sequence
gagctgaaaatgttgactctatcac

SEQ ID NO: 277616 - DNA, 25 bp, Probe sequence
gagctcaatcaaaagtttttaaaga

SEQ ID NO: 277617 - DNA, 25 bp, Probe sequence
gatacaaccaacaagagaagaatta

SEQ ID NO: 277618 - DNA, 25 bp, Probe sequence
gttgactctatcactgatgagcaaa

SEQ ID NO: 277619 - DNA, 25 bp, Probe sequence
gtttttaaagacgaacgtgatgagt

SEQ ID NO: 277620 - DNA, 25 bp, Probe sequence
gtgcaataagacactttagagctca

SEQ ID NO: 277621 - DNA, 25 bp, Probe sequence
ggagctgaaaatgttgactctatca

SEQ ID NO: 277622 - DNA, 25 bp, Probe sequence
tgttgactctatcactgatgagcaa

SEQ ID NO: 277623 - DNA, 25 bp, Probe sequence
tgactctatcactgatgagcaaagt

SEQ ID NO: 277624 - DNA, 25 bp, Probe sequence
tgaaaatgttgactctatcactgat

SEQ ID NO: 277625 - DNA, 25 bp, Probe sequence
taagacactttagagctcaatcaaa

SEQ ID NO: 277626 - DNA, 25 bp, Probe sequence
tagagctcaatcaaaagtttttaaa

SEQ ID NO: 277627 - DNA, 25 bp, Probe sequence
tttagagctcaatcaaaagttttta

SEQ ID NO: 277628 - DNA, 25 bp, Probe sequence
ttgactctatcactgatgagcaaag

SEQ ID NO: 277629 - DNA, 25 bp, Probe sequence
atttttatggaggaagacactaatg

SEQ ID NO: 277630 - DNA, 25 bp, Probe sequence
atttggcaaagatgatgaaagagtt

SEQ ID NO: 277631 - DNA, 25 bp, Probe sequence
agagctggagaagaaagcgagcgca

SEQ ID NO: 277632 - DNA, 25 bp, Probe sequence
aagagctggagaagaaagcgagcgc

SEQ ID NO: 277633 - DNA, 25 bp, Probe sequence
aatttttatggaggaagacactaat

SEQ ID NO: 277634 - DNA, 25 bp, Probe sequence
gaaagagttaagtttggaatggaat

SEQ ID NO: 277635 - DNA, 25 bp, Probe sequence
gagctggagaagaaagcgagcgcat

SEQ ID NO: 277636 - DNA, 25 bp, Probe sequence
gatgaaagagttaagtttggaatgg

SEQ ID NO: 277637 - DNA, 25 bp, Probe sequence
tttaataaacgaatttggcaaagat

SEQ ID NO: 277638 - DNA, 25 bp, Probe sequence
tttatggaggaagacactaatgaat

SEQ ID NO: 277639 - DNA, 25 bp, Probe sequence
tttttatggaggaagacactaatga

SEQ ID NO: 277640 - DNA, 25 bp, Probe sequence
ttttatggaggaagacactaatgaa

SEQ ID NO: 277641 - DNA, 25 bp, Probe sequence
ttaataaacgaatttggcaaagatg

SEQ ID NO: 277642 - DNA, 25 bp, Probe sequence
attaggtaaatttcacaaagcatta

SEQ ID NO: 277643 - DNA, 25 bp, Probe sequence
atgtggcgcactcttaaaaatgaat

SEQ ID NO: 277644 - DNA, 25 bp, Probe sequence
agagaacgtaacaaagagttggaga

SEQ ID NO: 277645 - DNA, 25 bp, Probe sequence
agcattaaaagaacgtgatgagtac

SEQ ID NO: 277646 - DNA, 25 bp, Probe sequence
acgtaacaaagagttggagaacatg

SEQ ID NO: 277647 - DNA, 25 bp, Probe sequence
aaagcattaaaagaacgtgatgagt

SEQ ID NO: 277648 - DNA, 25 bp, Probe sequence
aacaaagagttggagaacatgtggc

SEQ ID NO: 277649 - DNA, 25 bp, Probe sequence
aacgtaacaaagagttggagaacat

SEQ ID NO: 277650 - DNA, 25 bp, Probe sequence
aacatgtggcgcactcttaaaaatg

SEQ ID NO: 277651 - DNA, 25 bp, Probe sequence
aagagaacgtaacaaagagttggag

SEQ ID NO: 277652 - DNA, 25 bp, Probe sequence
aagcattaaaagaacgtgatgagta

SEQ ID NO: 277653 - DNA, 25 bp, Probe sequence
cgtaacaaagagttggagaacatgt

SEQ ID NO: 277654 - DNA, 25 bp, Probe sequence
gcgcactcttaaaaatgaattgctt

SEQ ID NO: 277655 - DNA, 25 bp, Probe sequence
gaacgtaacaaagagttggagaaca

SEQ ID NO: 277656 - DNA, 25 bp, Probe sequence
gaacatgtggcgcactcttaaaaat

SEQ ID NO: 277657 - DNA, 25 bp, Probe sequence
gagaacgtaacaaagagttggagaa

SEQ ID NO: 277658 - DNA, 25 bp, Probe sequence
gttattaggtaaatttcacaaagca

SEQ ID NO: 277659 - DNA, 25 bp, Probe sequence
gtaacaaagagttggagaacatgtg

SEQ ID NO: 277660 - DNA, 25 bp, Probe sequence
ggcgcactcttaaaaatgaattgct

SEQ ID NO: 277661 - DNA, 25 bp, Probe sequence
tgtggcgcactcttaaaaatgaatt

SEQ ID NO: 277662 - DNA, 25 bp, Probe sequence
taagagaacgtaacaaagagttgga

SEQ ID NO: 277663 - DNA, 25 bp, Probe sequence
taacaaagagttggagaacatgtgg

SEQ ID NO: 277664 - DNA, 25 bp, Probe sequence
tattaggtaaatttcacaaagcatt

SEQ ID NO: 277665 - DNA, 25 bp, Probe sequence
ttattaggtaaatttcacaaagcat

SEQ ID NO: 277666 - DNA, 25 bp, Probe sequence
ttaggtaaatttcacaaagcattaa

SEQ ID NO: 277667 - DNA, 25 bp, Probe sequence
attcatggaacagcttactgctcat

SEQ ID NO: 277668 - DNA, 25 bp, Probe sequence
atattatatggtcggatctacgtat

SEQ ID NO: 277669 - DNA, 25 bp, Probe sequence
atatccagaataacgactttaaaca

SEQ ID NO: 277670 - DNA, 25 bp, Probe sequence
atgacttacaaagagttgtctaact

SEQ ID NO: 277671 - DNA, 25 bp, Probe sequence
agagaaatattttatgacttacaaa

SEQ ID NO: 277672 - DNA, 25 bp, Probe sequence
acgtgagttacttgagcaggctatc

SEQ ID NO: 277673 - DNA, 25 bp, Probe sequence
acttgagcaggctatcaatgcacgt

SEQ ID NO: 277674 - DNA, 25 bp, Probe sequence
aagcctactattgaagaattactta

SEQ ID NO: 277675 - DNA, 25 bp, Probe sequence
aagaattacttattaataatggcat

SEQ ID NO: 277676 - DNA, 25 bp, Probe sequence
aagtaagcctactattgaagaatta

SEQ ID NO: 277677 - DNA, 25 bp, Probe sequence
aatgcacgtgtggacgaattagcga

SEQ ID NO: 277678 - DNA, 25 bp, Probe sequence
caggctatcaatgcacgtgtggacg

SEQ ID NO: 277679 - DNA, 25 bp, Probe sequence
ctatcaatgcacgtgtggacgaatt

SEQ ID NO: 277680 - DNA, 25 bp, Probe sequence
ctatctgaatttaagtaagcctact

SEQ ID NO: 277681 - DNA, 25 bp, Probe sequence
gcaggctatcaatgcacgtgtggac

SEQ ID NO: 277682 - DNA, 25 bp, Probe sequence
gcacgtgagttacttgagcaggcta

SEQ ID NO: 277683 - DNA, 25 bp, Probe sequence
gcacgtgtggacgaattagcgaaag

SEQ ID NO: 277684 - DNA, 25 bp, Probe sequence
gaattcatggaacagcttactgctc

SEQ ID NO: 277685 - DNA, 25 bp, Probe sequence
gaagcacgtgagttacttgagcagg

SEQ ID NO: 277686 - DNA, 25 bp, Probe sequence
gaaatattatatggtcggatctacg

SEQ ID NO: 277687 - DNA, 25 bp, Probe sequence
gagcaggctatcaatgcacgtgtgg

SEQ ID NO: 277688 - DNA, 25 bp, Probe sequence
gagttgtctaactatctgaatttaa

SEQ ID NO: 277689 - DNA, 25 bp, Probe sequence
gatgaagcacgtgagttacttgagc

SEQ ID NO: 277690 - DNA, 25 bp, Probe sequence
gatgaattcatggaacagcttactg

SEQ ID NO: 277691 - DNA, 25 bp, Probe sequence
gatgaagatgaagcacgtgagttac

SEQ ID NO: 277692 - DNA, 25 bp, Probe sequence
gattcaaaaagtctgatgtagatga

SEQ ID NO: 277693 - DNA, 25 bp, Probe sequence
gttacttgagcaggctatcaatgca

SEQ ID NO: 277694 - DNA, 25 bp, Probe sequence
gtgagttacttgagcaggctatcaa

SEQ ID NO: 277695 - DNA, 25 bp, Probe sequence
gtgtggacgaattagcgaaagagaa

SEQ ID NO: 277696 - DNA, 25 bp, Probe sequence
ggtcggatctacgtatagattcaaa

SEQ ID NO: 277697 - DNA, 25 bp, Probe sequence
ggctatcaatgcacgtgtggacgaa

SEQ ID NO: 277698 - DNA, 25 bp, Probe sequence
tcatggaacagcttactgctcatat

SEQ ID NO: 277699 - DNA, 25 bp, Probe sequence
ttatatggtcggatctacgtataga

SEQ ID NO: 277700 - DNA, 25 bp, Probe sequence
ttgagcaggctatcaatgcacgtgt

SEQ ID NO: 277701 - DNA, 25 bp, Probe sequence
agacggttgggaactacatgaagca

SEQ ID NO: 277702 - DNA, 25 bp, Probe sequence
attcacgtgatccgtactggtttga

SEQ ID NO: 277703 - DNA, 25 bp, Probe sequence
ataggttcagtaaatttgaaatgga

SEQ ID NO: 277704 - DNA, 25 bp, Probe sequence
atgaagcaatggacgcaccagaagg

SEQ ID NO: 277705 - DNA, 25 bp, Probe sequence
agactggaacaagctagactcgaac

SEQ ID NO: 277706 - DNA, 25 bp, Probe sequence
acggttgggaactacatgaagcaat

SEQ ID NO: 277707 - DNA, 25 bp, Probe sequence
actacatgaagcaatggacgcacca

SEQ ID NO: 277708 - DNA, 25 bp, Probe sequence
acattcacgtgatccgtactggttt

SEQ ID NO: 277709 - DNA, 25 bp, Probe sequence
acatgaagcaatggacgcaccagaa

SEQ ID NO: 277710 - DNA, 25 bp, Probe sequence
aaagactggaacaagctagactcga

SEQ ID NO: 277711 - DNA, 25 bp, Probe sequence
aaagacggttgggaactacatgaag

SEQ ID NO: 277712 - DNA, 25 bp, Probe sequence
aaacattcacgtgatccgtactggt

SEQ ID NO: 277713 - DNA, 25 bp, Probe sequence
aacattcacgtgatccgtactggtt

SEQ ID NO: 277714 - DNA, 25 bp, Probe sequence
aactacatgaagcaatggacgcacc

SEQ ID NO: 277715 - DNA, 25 bp, Probe sequence
aagactggaacaagctagactcgaa

SEQ ID NO: 277716 - DNA, 25 bp, Probe sequence
aagacggttgggaactacatgaagc

SEQ ID NO: 277717 - DNA, 25 bp, Probe sequence
catgaagcaatggacgcaccagaag

SEQ ID NO: 277718 - DNA, 25 bp, Probe sequence
cattcacgtgatccgtactggtttg

SEQ ID NO: 277719 - DNA, 25 bp, Probe sequence
ctacatgaagcaatggacgcaccag

SEQ ID NO: 277720 - DNA, 25 bp, Probe sequence
gcgtttaagcgagtacagagaaaag

SEQ ID NO: 277721 - DNA, 25 bp, Probe sequence
gaactacatgaagcaatggacgcac

SEQ ID NO: 277722 - DNA, 25 bp, Probe sequence
gaaagactggaacaagctagactcg

SEQ ID NO: 277723 - DNA, 25 bp, Probe sequence
gacggttgggaactacatgaagcaa

SEQ ID NO: 277724 - DNA, 25 bp, Probe sequence
gactggaacaagctagactcgaacg

SEQ ID NO: 277725 - DNA, 25 bp, Probe sequence
gataaaccttataggttcagtaaat

SEQ ID NO: 277726 - DNA, 25 bp, Probe sequence
gttgggaactacatgaagcaatgga

SEQ ID NO: 277727 - DNA, 25 bp, Probe sequence
gtaaaagacggttgggaactacatg

SEQ ID NO: 277728 - DNA, 25 bp, Probe sequence
gggaactacatgaagcaatggacgc

SEQ ID NO: 277729 - DNA, 25 bp, Probe sequence
ggttgggaactacatgaagcaatgg

SEQ ID NO: 277730 - DNA, 25 bp, Probe sequence
ggaactacatgaagcaatggacgca

SEQ ID NO: 277731 - DNA, 25 bp, Probe sequence
tcacgtgatccgtactggtttgata

SEQ ID NO: 277732 - DNA, 25 bp, Probe sequence
taaaagacggttgggaactacatga

SEQ ID NO: 277733 - DNA, 25 bp, Probe sequence
tacatgaagcaatggacgcaccaga

SEQ ID NO: 277734 - DNA, 25 bp, Probe sequence
ttcacgtgatccgtactggtttgat

SEQ ID NO: 277735 - DNA, 25 bp, Probe sequence
ataaccgctggaatggtttctaaga

SEQ ID NO: 277736 - DNA, 25 bp, Probe sequence
agtcacggtataaccgctggaatgg

SEQ ID NO: 277737 - DNA, 25 bp, Probe sequence
accgctggaatggtttctaagagag

SEQ ID NO: 277738 - DNA, 25 bp, Probe sequence
aaccgctggaatggtttctaagaga

SEQ ID NO: 277739 - DNA, 25 bp, Probe sequence
aagtcacggtataaccgctggaatg

SEQ ID NO: 277740 - DNA, 25 bp, Probe sequence
cacggtataaccgctggaatggttt

SEQ ID NO: 277741 - DNA, 25 bp, Probe sequence
cagaaggtacgcgtttaagcgagta

SEQ ID NO: 277742 - DNA, 25 bp, Probe sequence
cgaacgcaaattggaaagaaagcga

SEQ ID NO: 277743 - DNA, 25 bp, Probe sequence
ccgctggaatggtttctaagagagt

SEQ ID NO: 277744 - DNA, 25 bp, Probe sequence
cgctggaatggtttctaagagagta

SEQ ID NO: 277745 - DNA, 25 bp, Probe sequence
gctggaatggtttctaagagagtaa

SEQ ID NO: 277746 - DNA, 25 bp, Probe sequence
gcaccagaaggtacgcgtttaagcg

SEQ ID NO: 277747 - DNA, 25 bp, Probe sequence
taaccgctggaatggtttctaagag

SEQ ID NO: 277748 - DNA, 25 bp, Probe sequence
gaacgcaaattggaaagaaagcgaa

SEQ ID NO: 277749 - DNA, 25 bp, Probe sequence
gtataaccgctggaatggtttctaa

SEQ ID NO: 277750 - DNA, 25 bp, Probe sequence
ggacgcaccagaaggtacgcgttta

SEQ ID NO: 277751 - DNA, 25 bp, Probe sequence
tcgaacgcaaattggaaagaaagcg

SEQ ID NO: 277752 - DNA, 25 bp, Probe sequence
tataaccgctggaatggtttctaag

SEQ ID NO: 277753 - DNA, 25 bp, Probe sequence
agaggtacgaggcgcaagttaaaag

SEQ ID NO: 277754 - DNA, 25 bp, Probe sequence
aggtacgaggcgcaagttaaaagag

SEQ ID NO: 277755 - DNA, 25 bp, Probe sequence
agagaggtacgaggcgcaagttaaa

SEQ ID NO: 277756 - DNA, 25 bp, Probe sequence
agcgaaagagaggtacgaggcgcaa

SEQ ID NO: 277757 - DNA, 25 bp, Probe sequence
acgaggcgcaagttaaaagaggtgc

SEQ ID NO: 277758 - DNA, 25 bp, Probe sequence
aaagagaggtacgaggcgcaagtta

SEQ ID NO: 277759 - DNA, 25 bp, Probe sequence
aagagaggtacgaggcgcaagttaa

SEQ ID NO: 277760 - DNA, 25 bp, Probe sequence
aacaataaatgataaaccttatagg

SEQ ID NO: 277761 - DNA, 25 bp, Probe sequence
cgaggcgcaagttaaaagaggtgca

SEQ ID NO: 277762 - DNA, 25 bp, Probe sequence
cgaaagagaggtacgaggcgcaagt

SEQ ID NO: 277763 - DNA, 25 bp, Probe sequence
gcgaaagagaggtacgaggcgcaag

SEQ ID NO: 277764 - DNA, 25 bp, Probe sequence
gaaagagaggtacgaggcgcaagtt

SEQ ID NO: 277765 - DNA, 25 bp, Probe sequence
gagaggtacgaggcgcaagttaaaa

SEQ ID NO: 277766 - DNA, 25 bp, Probe sequence
gaggtacgaggcgcaagttaaaaga

SEQ ID NO: 277767 - DNA, 25 bp, Probe sequence
gaggcgcaagttaaaagaggtgcag

SEQ ID NO: 277768 - DNA, 25 bp, Probe sequence
gtacgaggcgcaagttaaaagaggt

SEQ ID NO: 277769 - DNA, 25 bp, Probe sequence
gtaacaataaatgataaaccttata

SEQ ID NO: 277770 - DNA, 25 bp, Probe sequence
ggtacgaggcgcaagttaaaagagg

SEQ ID NO: 277771 - DNA, 25 bp, Probe sequence
atttgtttaatgtgcctcaaaaaca

SEQ ID NO: 277772 - DNA, 25 bp, Probe sequence
atgtttaagaaatggcaggaagcat

SEQ ID NO: 277773 - DNA, 25 bp, Probe sequence
accaaatgtttaagaaatggcagga

SEQ ID NO: 277774 - DNA, 25 bp, Probe sequence
acatttgtttaatgtgcctcaaaaa

SEQ ID NO: 277775 - DNA, 25 bp, Probe sequence
aaatgtttaagaaatggcaggaagc

SEQ ID NO: 277776 - DNA, 25 bp, Probe sequence
aaccaaatgtttaagaaatggcagg

SEQ ID NO: 277777 - DNA, 25 bp, Probe sequence
aatgtttaagaaatggcaggaagca

SEQ ID NO: 277778 - DNA, 25 bp, Probe sequence
caaatgtttaagaaatggcaggaag

SEQ ID NO: 277779 - DNA, 25 bp, Probe sequence
catttgtttaatgtgcctcaaaaac

SEQ ID NO: 277780 - DNA, 25 bp, Probe sequence
ccaaatgtttaagaaatggcaggaa

SEQ ID NO: 277781 - DNA, 25 bp, Probe sequence
gtttaagaaatggcaggaagcataa

SEQ ID NO: 277782 - DNA, 25 bp, Probe sequence
gtttaatgtgcctcaaaaacattca

SEQ ID NO: 277783 - DNA, 25 bp, Probe sequence
tgtttaatgtgcctcaaaaacattc

SEQ ID NO: 277784 - DNA, 25 bp, Probe sequence
tgtttaagaaatggcaggaagcata

SEQ ID NO: 277785 - DNA, 25 bp, Probe sequence
taatgtgcctcaaaaacattcacgt

SEQ ID NO: 277786 - DNA, 25 bp, Probe sequence
tttgtttaatgtgcctcaaaaacat

SEQ ID NO: 277787 - DNA, 25 bp, Probe sequence
tttaatgtgcctcaaaaacattcac

SEQ ID NO: 277788 - DNA, 25 bp, Probe sequence
ttaatgtgcctcaaaaacattcacg

SEQ ID NO: 277789 - DNA, 25 bp, Probe sequence
ttgtttaatgtgcctcaaaaacatt

SEQ ID NO: 277790 - DNA, 25 bp, Probe sequence
attggcattaggacttgaacactta

SEQ ID NO: 277791 - DNA, 25 bp, Probe sequence
attatataggtatgagcttccaaat

SEQ ID NO: 277792 - DNA, 25 bp, Probe sequence
attaggtaagccggtcggaagtgat

SEQ ID NO: 277793 - DNA, 25 bp, Probe sequence
atatctgaatctatcgttgatgttt

SEQ ID NO: 277794 - DNA, 25 bp, Probe sequence
agacaactgctattttaactgggaa

SEQ ID NO: 277795 - DNA, 25 bp, Probe sequence
agaacaggcatcattacacttattg

SEQ ID NO: 277796 - DNA, 25 bp, Probe sequence
aaatgggatcagacaactgctattt

SEQ ID NO: 277797 - DNA, 25 bp, Probe sequence
aaacgtatcaagttgcagtcgcatt

SEQ ID NO: 277798 - DNA, 25 bp, Probe sequence
aagaccaatttaacagtcaacagac

SEQ ID NO: 277799 - DNA, 25 bp, Probe sequence
caaaggtgattaacgtggcaaagtt

SEQ ID NO: 277800 - DNA, 25 bp, Probe sequence
gccggtcggaagtgatttgcttaat

SEQ ID NO: 277801 - DNA, 25 bp, Probe sequence
gaacttttccaatttcaagaccaat

SEQ ID NO: 277802 - DNA, 25 bp, Probe sequence
gaacaaacgtctgaacaaacgtatc

SEQ ID NO: 277803 - DNA, 25 bp, Probe sequence
gacaagcgtcgaggcaagttaacca

SEQ ID NO: 277804 - DNA, 25 bp, Probe sequence
gatgatgtattagacttcacaagta

SEQ ID NO: 277805 - DNA, 25 bp, Probe sequence
gttgcagtcgcattagagttaattc

SEQ ID NO: 277806 - DNA, 25 bp, Probe sequence
gttaccgattttattagaaatgcgt

SEQ ID NO: 277807 - DNA, 25 bp, Probe sequence
gtattagacttcacaagtaccgaaa

SEQ ID NO: 277808 - DNA, 25 bp, Probe sequence
gttaaagataatcgtgtacatcaat

SEQ ID NO: 277809 - DNA, 25 bp, Probe sequence
gttattgataaaagcgacaagcgtc

SEQ ID NO: 277810 - DNA, 25 bp, Probe sequence
gtatcaatcgcaaaacagcactgtt

SEQ ID NO: 277811 - DNA, 25 bp, Probe sequence
gtaaaagagtacgcccagcatttgt

SEQ ID NO: 277812 - DNA, 25 bp, Probe sequence
gtcgaggcaagttaaccatatcaaa

SEQ ID NO: 277813 - DNA, 25 bp, Probe sequence
ggtcatattacgttaccgattttat

SEQ ID NO: 277814 - DNA, 25 bp, Probe sequence
gtgatttgcttaatggtcatattac

SEQ ID NO: 277815 - DNA, 25 bp, Probe sequence
ggcaaagatgaacaaacgtctgaac

SEQ ID NO: 277816 - DNA, 25 bp, Probe sequence
ggcaacacttgttcatgatgacgtt

SEQ ID NO: 277817 - DNA, 25 bp, Probe sequence
ggcatcattacacttattgtcttct

SEQ ID NO: 277818 - DNA, 25 bp, Probe sequence
tgagcttccaaatcattgatgatgt

SEQ ID NO: 277819 - DNA, 25 bp, Probe sequence
taactgggaattttttattggcatt

SEQ ID NO: 277820 - DNA, 25 bp, Probe sequence
tacacttattgtcttctggtggtaa

SEQ ID NO: 277821 - DNA, 25 bp, Probe sequence
tatcgttgatgtttgtagaggggaa

SEQ ID NO: 277822 - DNA, 25 bp, Probe sequence
tatttacgacgtatcaatcgcaaaa

SEQ ID NO: 277823 - DNA, 25 bp, Probe sequence
ttaattcatatggcaacacttgttc

SEQ ID NO: 277824 - DNA, 25 bp, Probe sequence
atttgatgattattccgaaagaaaa

SEQ ID NO: 277825 - DNA, 25 bp, Probe sequence
atatgaaaaatggccaacttaagcc

SEQ ID NO: 277826 - DNA, 25 bp, Probe sequence
atcatgatgcaacttttatgagaat

SEQ ID NO: 277827 - DNA, 25 bp, Probe sequence
atgcaacttttatgagaatgaagga

SEQ ID NO: 277828 - DNA, 25 bp, Probe sequence
atgatgcaacttttatgagaatgaa

SEQ ID NO: 277829 - DNA, 25 bp, Probe sequence
acaaatagcgacaaattctcaattt

SEQ ID NO: 277830 - DNA, 25 bp, Probe sequence
acaaaaatcgattcttaaagataga

SEQ ID NO: 277831 - DNA, 25 bp, Probe sequence
aaaactgatcatgatgcaactttta

SEQ ID NO: 277832 - DNA, 25 bp, Probe sequence
aatttgatgattattccgaaagaaa

SEQ ID NO: 277833 - DNA, 25 bp, Probe sequence
catgatgcaacttttatgagaatga

SEQ ID NO: 277834 - DNA, 25 bp, Probe sequence
catatgaaaaatggccaacttaagc

SEQ ID NO: 277835 - DNA, 25 bp, Probe sequence
ctaaaactgatcatgatgcaacttt

SEQ ID NO: 277836 - DNA, 25 bp, Probe sequence
ctgatcatgatgcaacttttatgag

SEQ ID NO: 277837 - DNA, 25 bp, Probe sequence
gcaacttttatgagaatgaaggaag

SEQ ID NO: 277838 - DNA, 25 bp, Probe sequence
gaatgaaggaagaccatatgaaaaa

SEQ ID NO: 277839 - DNA, 25 bp, Probe sequence
gaacaaaaatcgattcttaaagata

SEQ ID NO: 277840 - DNA, 25 bp, Probe sequence
gagaatgaaggaagaccatatgaaa

SEQ ID NO: 277841 - DNA, 25 bp, Probe sequence
gatgcaacttttatgagaatgaagg

SEQ ID NO: 277842 - DNA, 25 bp, Probe sequence
gatcatgatgcaacttttatgagaa

SEQ ID NO: 277843 - DNA, 25 bp, Probe sequence
gatacaatttacaaatagcgacaaa

SEQ ID NO: 277844 - DNA, 25 bp, Probe sequence
gttaaacgagagctaggttttgtat

SEQ ID NO: 277845 - DNA, 25 bp, Probe sequence
tgatcatgatgcaacttttatgaga

SEQ ID NO: 277846 - DNA, 25 bp, Probe sequence
tgatgcaacttttatgagaatgaag

SEQ ID NO: 277847 - DNA, 25 bp, Probe sequence
tctaaaactgatcatgatgcaactt

SEQ ID NO: 277848 - DNA, 25 bp, Probe sequence
tcatgatgcaacttttatgagaatg

SEQ ID NO: 277849 - DNA, 25 bp, Probe sequence
taaaactgatcatgatgcaactttt

SEQ ID NO: 277850 - DNA, 25 bp, Probe sequence
tacaaatagcgacaaattctcaatt

SEQ ID NO: 277851 - DNA, 25 bp, Probe sequence
tatacatttgtgtggaagaaaagta

SEQ ID NO: 277852 - DNA, 25 bp, Probe sequence
tttctaaaactgatcatgatgcaac

SEQ ID NO: 277853 - DNA, 25 bp, Probe sequence
tttgatgattattccgaaagaaaaa

SEQ ID NO: 277854 - DNA, 25 bp, Probe sequence
ttttctaaaactgatcatgatgcaa

SEQ ID NO: 277855 - DNA, 25 bp, Probe sequence
ttacaaatagcgacaaattctcaat

SEQ ID NO: 277856 - DNA, 25 bp, Probe sequence
ttaaacgagagctaggttttgtatt

SEQ ID NO: 277857 - DNA, 25 bp, Probe sequence
ttctaaaactgatcatgatgcaact

SEQ ID NO: 277858 - DNA, 25 bp, Probe sequence
atttatccagtttcatagtcaatgt

SEQ ID NO: 277859 - DNA, 25 bp, Probe sequence
ataacttgatccaacttacactacc

SEQ ID NO: 277860 - DNA, 25 bp, Probe sequence
atcattctattgagaacgaagatag

SEQ ID NO: 277861 - DNA, 25 bp, Probe sequence
agtagaagctaatgccaataggtat

SEQ ID NO: 277862 - DNA, 25 bp, Probe sequence
agatactagaactttaattccattt

SEQ ID NO: 277863 - DNA, 25 bp, Probe sequence
acgaaaattcaaaaacattatatcg

SEQ ID NO: 277864 - DNA, 25 bp, Probe sequence
acagatactagaactttaattccat

SEQ ID NO: 277865 - DNA, 25 bp, Probe sequence
aaattataacttgatccaacttaca

SEQ ID NO: 277866 - DNA, 25 bp, Probe sequence
aattataacttgatccaacttacac

SEQ ID NO: 277867 - DNA, 25 bp, Probe sequence
ctttatttatccagtttcatagtca

SEQ ID NO: 277868 - DNA, 25 bp, Probe sequence
cccaacagatactagaactttaatt

SEQ ID NO: 277869 - DNA, 25 bp, Probe sequence
gctaatgccaataggtatacatttg

SEQ ID NO: 277870 - DNA, 25 bp, Probe sequence
gaagatagtactcaaattagaaaac

SEQ ID NO: 277871 - DNA, 25 bp, Probe sequence
gaagctaatgccaataggtatacat

SEQ ID NO: 277872 - DNA, 25 bp, Probe sequence
gaacgaagatagtactcaaattaga

SEQ ID NO: 277873 - DNA, 25 bp, Probe sequence
gatactagaactttaattccatttt

SEQ ID NO: 277874 - DNA, 25 bp, Probe sequence
gtttcactcgaatgtcagttcgagg

SEQ ID NO: 277875 - DNA, 25 bp, Probe sequence
gtagaagctaatgccaataggtata

SEQ ID NO: 277876 - DNA, 25 bp, Probe sequence
gggtttcactcgaatgtcagttcga

SEQ ID NO: 277877 - DNA, 25 bp, Probe sequence
tgggtttcactcgaatgtcagttcg

SEQ ID NO: 277878 - DNA, 25 bp, Probe sequence
tttgggtttcactcgaatgtcagtt

SEQ ID NO: 277879 - DNA, 25 bp, Probe sequence
tctttatttatccagtttcatagtc

SEQ ID NO: 277880 - DNA, 25 bp, Probe sequence
tcactcgaatgtcagttcgaggaat

SEQ ID NO: 277881 - DNA, 25 bp, Probe sequence
taaaaattataacttgatccaactt

SEQ ID NO: 277882 - DNA, 25 bp, Probe sequence
tataacttgatccaacttacactac

SEQ ID NO: 277883 - DNA, 25 bp, Probe sequence
tatccagtttcatagtcaatgttta

SEQ ID NO: 277884 - DNA, 25 bp, Probe sequence
tatttatccagtttcatagtcaatg

SEQ ID NO: 277885 - DNA, 25 bp, Probe sequence
tttatccagtttcatagtcaatgtt

SEQ ID NO: 277886 - DNA, 25 bp, Probe sequence
tttatttatccagtttcatagtcaa

SEQ ID NO: 277887 - DNA, 25 bp, Probe sequence
ttatttatccagtttcatagtcaat

SEQ ID NO: 277888 - DNA, 25 bp, Probe sequence
ttatccagtttcatagtcaatgttt

SEQ ID NO: 277889 - DNA, 25 bp, Probe sequence
ttataacttgatccaacttacacta

SEQ ID NO: 277890 - DNA, 25 bp, Probe sequence
ttcactcgaatgtcagttcgaggaa

SEQ ID NO: 277891 - DNA, 25 bp, Probe sequence
ttgggtttcactcgaatgtcagttc

SEQ ID NO: 277892 - DNA, 25 bp, Probe sequence
attggtgcggaagaaagtattcaaa

SEQ ID NO: 277893 - DNA, 25 bp, Probe sequence
attcagttctatagtcaatgtttaa

SEQ ID NO: 277894 - DNA, 25 bp, Probe sequence
atatacattggtgcggaagaaagta

SEQ ID NO: 277895 - DNA, 25 bp, Probe sequence
atttattcagttctatagtcaatgt

SEQ ID NO: 277896 - DNA, 25 bp, Probe sequence
atagatatacattggtgcggaagaa

SEQ ID NO: 277897 - DNA, 25 bp, Probe sequence
agtagaagctagtgccaatagatat

SEQ ID NO: 277898 - DNA, 25 bp, Probe sequence
agatatacattggtgcggaagaaag

SEQ ID NO: 277899 - DNA, 25 bp, Probe sequence
agaagctagtgccaatagatataca

SEQ ID NO: 277900 - DNA, 25 bp, Probe sequence
agctagtgccaatagatatacattg

SEQ ID NO: 277901 - DNA, 25 bp, Probe sequence
agcccaagatcaaacactttcttat

SEQ ID NO: 277902 - DNA, 25 bp, Probe sequence
acattggtgcggaagaaagtattca

SEQ ID NO: 277903 - DNA, 25 bp, Probe sequence
aagctagtgccaatagatatacatt

SEQ ID NO: 277904 - DNA, 25 bp, Probe sequence
aatagatatacattggtgcggaaga

SEQ ID NO: 277905 - DNA, 25 bp, Probe sequence
cattggtgcggaagaaagtattcaa

SEQ ID NO: 277906 - DNA, 25 bp, Probe sequence
gccaatagatatacattggtgcgga

SEQ ID NO: 277907 - DNA, 25 bp, Probe sequence
gctagtgccaatagatatacattgg

SEQ ID NO: 277908 - DNA, 25 bp, Probe sequence
gaagctagtgccaatagatatacat

SEQ ID NO: 277909 - DNA, 25 bp, Probe sequence
gatatacattggtgcggaagaaagt

SEQ ID NO: 277910 - DNA, 25 bp, Probe sequence
gttagcccaagatcaaacactttct

SEQ ID NO: 277911 - DNA, 25 bp, Probe sequence
gtagaagctagtgccaatagatata

SEQ ID NO: 277912 - DNA, 25 bp, Probe sequence
gtgccaatagatatacattggtgcg

SEQ ID NO: 277913 - DNA, 25 bp, Probe sequence
ggttagcccaagatcaaacactttc

SEQ ID NO: 277914 - DNA, 25 bp, Probe sequence
tggtgcggaagaaagtattcaaaat

SEQ ID NO: 277915 - DNA, 25 bp, Probe sequence
tacattggtgcggaagaaagtattc

SEQ ID NO: 277916 - DNA, 25 bp, Probe sequence
tagaagctagtgccaatagatatac

SEQ ID NO: 277917 - DNA, 25 bp, Probe sequence
tagcccaagatcaaacactttctta

SEQ ID NO: 277918 - DNA, 25 bp, Probe sequence
tagatatacattggtgcggaagaaa

SEQ ID NO: 277919 - DNA, 25 bp, Probe sequence
tatttattcagttctatagtcaatg

SEQ ID NO: 277920 - DNA, 25 bp, Probe sequence
tattcagttctatagtcaatgttta

SEQ ID NO: 277921 - DNA, 25 bp, Probe sequence
tttattcagttctatagtcaatgtt

SEQ ID NO: 277922 - DNA, 25 bp, Probe sequence
ttagcccaagatcaaacactttctt

SEQ ID NO: 277923 - DNA, 25 bp, Probe sequence
ttattcagttctatagtcaatgttt

SEQ ID NO: 277924 - DNA, 25 bp, Probe sequence
ttatttattcagttctatagtcaat

SEQ ID NO: 277925 - DNA, 25 bp, Probe sequence
ttgatgataattcaatttttattga

SEQ ID NO: 277926 - DNA, 25 bp, Probe sequence
attgtagctgatgcatgttatgata

SEQ ID NO: 277927 - DNA, 25 bp, Probe sequence
atatgaatgcaacgagctgtacatt

SEQ ID NO: 277928 - DNA, 25 bp, Probe sequence
atgcaacgagctgtacattataaaa

SEQ ID NO: 277929 - DNA, 25 bp, Probe sequence
atgaatgcaacgagctgtacattat

SEQ ID NO: 277930 - DNA, 25 bp, Probe sequence
agctgatgcatgttatgatagtgag

SEQ ID NO: 277931 - DNA, 25 bp, Probe sequence
agctatatgaatgcaacgagctgta

SEQ ID NO: 277932 - DNA, 25 bp, Probe sequence
agctgtacattataaaatacatatc

SEQ ID NO: 277933 - DNA, 25 bp, Probe sequence
acgagctgtacattataaaatacat

SEQ ID NO: 277934 - DNA, 25 bp, Probe sequence
aacactcaaaattggaaatatgacg

SEQ ID NO: 277935 - DNA, 25 bp, Probe sequence
aacgagctgtacattataaaataca

SEQ ID NO: 277936 - DNA, 25 bp, Probe sequence
aagctatatgaatgcaacgagctgt

SEQ ID NO: 277937 - DNA, 25 bp, Probe sequence
aatgcaacgagctgtacattataaa

SEQ ID NO: 277938 - DNA, 25 bp, Probe sequence
caagctatatgaatgcaacgagctg

SEQ ID NO: 277939 - DNA, 25 bp, Probe sequence
caacgagctgtacattataaaatac

SEQ ID NO: 277940 - DNA, 25 bp, Probe sequence
catgttatgatagtgagcaaaacta

SEQ ID NO: 277941 - DNA, 25 bp, Probe sequence
ctatatgaatgcaacgagctgtaca

SEQ ID NO: 277942 - DNA, 25 bp, Probe sequence
ctgatgcatgttatgatagtgagca

SEQ ID NO: 277943 - DNA, 25 bp, Probe sequence
cgagctgtacattataaaatacata

SEQ ID NO: 277944 - DNA, 25 bp, Probe sequence
gctgatgcatgttatgatagtgagc

SEQ ID NO: 277945 - DNA, 25 bp, Probe sequence
gctatatgaatgcaacgagctgtac

SEQ ID NO: 277946 - DNA, 25 bp, Probe sequence
gcatgttatgatagtgagcaaaact

SEQ ID NO: 277947 - DNA, 25 bp, Probe sequence
gcaacgagctgtacattataaaata

SEQ ID NO: 277948 - DNA, 25 bp, Probe sequence
gaatgcaacgagctgtacattataa

SEQ ID NO: 277949 - DNA, 25 bp, Probe sequence
gatgcatgttatgatagtgagcaaa

SEQ ID NO: 277950 - DNA, 25 bp, Probe sequence
gtagctgatgcatgttatgatagtg

SEQ ID NO: 277951 - DNA, 25 bp, Probe sequence
tgtagctgatgcatgttatgatagt

SEQ ID NO: 277952 - DNA, 25 bp, Probe sequence
tgatgcatgttatgatagtgagcaa

SEQ ID NO: 277953 - DNA, 25 bp, Probe sequence
tgaatgcaacgagctgtacattata

SEQ ID NO: 277954 - DNA, 25 bp, Probe sequence
tgcaacgagctgtacattataaaat

SEQ ID NO: 277955 - DNA, 25 bp, Probe sequence
tgcatgttatgatagtgagcaaaac

SEQ ID NO: 277956 - DNA, 25 bp, Probe sequence
tagctgatgcatgttatgatagtga

SEQ ID NO: 277957 - DNA, 25 bp, Probe sequence
tatgaatgcaacgagctgtacatta

SEQ ID NO: 277958 - DNA, 25 bp, Probe sequence
tatatgaatgcaacgagctgtacat

SEQ ID NO: 277959 - DNA, 25 bp, Probe sequence
ttgtagctgatgcatgttatgatag

SEQ ID NO: 277960 - DNA, 25 bp, Probe sequence
atttattcagttcgcttatttttct

SEQ ID NO: 277961 - DNA, 25 bp, Probe sequence
aaaatgatatttcgcgacatgttaa

SEQ ID NO: 277962 - DNA, 25 bp, Probe sequence
caaaatgatatttcgcgacatgtta

SEQ ID NO: 277963 - DNA, 25 bp, Probe sequence
tcaaaatgatatttcgcgacatgtt

SEQ ID NO: 277964 - DNA, 25 bp, Probe sequence
tatttattcagttcgcttatttttc

SEQ ID NO: 277965 - DNA, 25 bp, Probe sequence
ttatttattcagttcgcttattttt

SEQ ID NO: 277966 - DNA, 25 bp, Probe sequence
atcaatgcatgaagccaaattcgaa

SEQ ID NO: 277967 - DNA, 25 bp, Probe sequence
atcatgttctttgagacatcaatgc

SEQ ID NO: 277968 - DNA, 25 bp, Probe sequence
atgaatgtgatgactgttcatcatg

SEQ ID NO: 277969 - DNA, 25 bp, Probe sequence
agacatcaatgcatgaagccaaatt

SEQ ID NO: 277970 - DNA, 25 bp, Probe sequence
acatcaatgcatgaagccaaattcg

SEQ ID NO: 277971 - DNA, 25 bp, Probe sequence
aaaatgataatacgcgatatgttaa

SEQ ID NO: 277972 - DNA, 25 bp, Probe sequence
aatgtgatgactgttcatcatgttc

SEQ ID NO: 277973 - DNA, 25 bp, Probe sequence
aatgataatacgcgatatgttaatg

SEQ ID NO: 277974 - DNA, 25 bp, Probe sequence
caaaatgataatacgcgatatgtta

SEQ ID NO: 277975 - DNA, 25 bp, Probe sequence
catcaatgcatgaagccaaattcga

SEQ ID NO: 277976 - DNA, 25 bp, Probe sequence
catcatgttctttgagacatcaatg

SEQ ID NO: 277977 - DNA, 25 bp, Probe sequence
ctttgagacatcaatgcatgaagcc

SEQ ID NO: 277978 - DNA, 25 bp, Probe sequence
ctgttcatcatgttctttgagacat

SEQ ID NO: 277979 - DNA, 25 bp, Probe sequence
cctcaaaatgataatacgcgatatg

SEQ ID NO: 277980 - DNA, 25 bp, Probe sequence
gaatgtgatgactgttcatcatgtt

SEQ ID NO: 277981 - DNA, 25 bp, Probe sequence
gacatcaatgcatgaagccaaattc

SEQ ID NO: 277982 - DNA, 25 bp, Probe sequence
gagacatcaatgcatgaagccaaat

SEQ ID NO: 277983 - DNA, 25 bp, Probe sequence
gttctttgagacatcaatgcatgaa

SEQ ID NO: 277984 - DNA, 25 bp, Probe sequence
gttcatcatgttctttgagacatca

SEQ ID NO: 277985 - DNA, 25 bp, Probe sequence
tgttcatcatgttctttgagacatc

SEQ ID NO: 277986 - DNA, 25 bp, Probe sequence
tgttctttgagacatcaatgcatga

SEQ ID NO: 277987 - DNA, 25 bp, Probe sequence
tgagacatcaatgcatgaagccaaa

SEQ ID NO: 277988 - DNA, 25 bp, Probe sequence
tgaatgtgatgactgttcatcatgt

SEQ ID NO: 277989 - DNA, 25 bp, Probe sequence
tcctcaaaatgataatacgcgatat

SEQ ID NO: 277990 - DNA, 25 bp, Probe sequence
tctttgagacatcaatgcatgaagc

SEQ ID NO: 277991 - DNA, 25 bp, Probe sequence
tcatcatgttctttgagacatcaat

SEQ ID NO: 277992 - DNA, 25 bp, Probe sequence
tcatgttctttgagacatcaatgca

SEQ ID NO: 277993 - DNA, 25 bp, Probe sequence
tcaaaatgataatacgcgatatgtt

SEQ ID NO: 277994 - DNA, 25 bp, Probe sequence
tttgagacatcaatgcatgaagcca

SEQ ID NO: 277995 - DNA, 25 bp, Probe sequence
ttctttgagacatcaatgcatgaag

SEQ ID NO: 277996 - DNA, 25 bp, Probe sequence
ttcatcatgttctttgagacatcaa

SEQ ID NO: 277997 - DNA, 25 bp, Probe sequence
ttgagacatcaatgcatgaagccaa

SEQ ID NO: 277998 - DNA, 25 bp, Probe sequence
ttcctcaaaatgataatacgcgata

SEQ ID NO: 277999 - DNA, 25 bp, Probe sequence
atatgcatatgagcttaatgtccca

SEQ ID NO: 278000 - DNA, 25 bp, Probe sequence
atatgagcttaatgtcccaagcgca

SEQ ID NO: 278001 - DNA, 25 bp, Probe sequence
atcttatatgcatatgagcttaatg

SEQ ID NO: 278002 - DNA, 25 bp, Probe sequence
atgcatatgagcttaatgtcccaag

SEQ ID NO: 278003 - DNA, 25 bp, Probe sequence
atgagcttaatgtcccaagcgcatt

SEQ ID NO: 278004 - DNA, 25 bp, Probe sequence
atgtcccaagcgcatttttatattg

SEQ ID NO: 278005 - DNA, 25 bp, Probe sequence
agcttaatgtcccaagcgcattttt

SEQ ID NO: 278006 - DNA, 25 bp, Probe sequence
aatgtcccaagcgcatttttatatt

SEQ ID NO: 278007 - DNA, 25 bp, Probe sequence
catatgagcttaatgtcccaagcgc

SEQ ID NO: 278008 - DNA, 25 bp, Probe sequence
cttaatgtcccaagcgcatttttat

SEQ ID NO: 278009 - DNA, 25 bp, Probe sequence
cttatatgcatatgagcttaatgtc

SEQ ID NO: 278010 - DNA, 25 bp, Probe sequence
gcttaatgtcccaagcgcattttta

SEQ ID NO: 278011 - DNA, 25 bp, Probe sequence
gcatatgagcttaatgtcccaagcg

SEQ ID NO: 278012 - DNA, 25 bp, Probe sequence
gagcttaatgtcccaagcgcatttt

SEQ ID NO: 278013 - DNA, 25 bp, Probe sequence
tgtcccaagcgcatttttatattga

SEQ ID NO: 278014 - DNA, 25 bp, Probe sequence
tgagcttaatgtcccaagcgcattt

SEQ ID NO: 278015 - DNA, 25 bp, Probe sequence
tgcatatgagcttaatgtcccaagc

SEQ ID NO: 278016 - DNA, 25 bp, Probe sequence
tcttatatgcatatgagcttaatgt

SEQ ID NO: 278017 - DNA, 25 bp, Probe sequence
taatgtcccaagcgcatttttatat

SEQ ID NO: 278018 - DNA, 25 bp, Probe sequence
tatatgcatatgagcttaatgtccc

SEQ ID NO: 278019 - DNA, 25 bp, Probe sequence
tatgagcttaatgtcccaagcgcat

SEQ ID NO: 278020 - DNA, 25 bp, Probe sequence
tatgcatatgagcttaatgtcccaa

SEQ ID NO: 278021 - DNA, 25 bp, Probe sequence
ttatatgcatatgagcttaatgtcc

SEQ ID NO: 278022 - DNA, 25 bp, Probe sequence
ttaatgtcccaagcgcatttttata

SEQ ID NO: 278023 - DNA, 25 bp, Probe sequence
cgtcagtgaattgtgtaagtttttc

SEQ ID NO: 278024 - DNA, 25 bp, Probe sequence
atgcgtcagtgaattgtgtaagttt

SEQ ID NO: 278025 - DNA, 25 bp, Probe sequence
agttcatgcgtcagtgaattgtgta

SEQ ID NO: 278026 - DNA, 25 bp, Probe sequence
aaagttcatgcgtcagtgaattgtg

SEQ ID NO: 278027 - DNA, 25 bp, Probe sequence
aaaagttcatgcgtcagtgaattgt

SEQ ID NO: 278028 - DNA, 25 bp, Probe sequence
aagttcatgcgtcagtgaattgtgt

SEQ ID NO: 278029 - DNA, 25 bp, Probe sequence
aatgtgctgataatgatttactcaa

SEQ ID NO: 278030 - DNA, 25 bp, Probe sequence
cagtgaattgtgtaagtttttcaaa

SEQ ID NO: 278031 - DNA, 25 bp, Probe sequence
catgcgtcagtgaattgtgtaagtt

SEQ ID NO: 278032 - DNA, 25 bp, Probe sequence
gcgtcagtgaattgtgtaagttttt

SEQ ID NO: 278033 - DNA, 25 bp, Probe sequence
gaatgtgctgataatgatttactca

SEQ ID NO: 278034 - DNA, 25 bp, Probe sequence
gttcatgcgtcagtgaattgtgtaa

SEQ ID NO: 278035 - DNA, 25 bp, Probe sequence
gtcagtgaattgtgtaagtttttca

SEQ ID NO: 278036 - DNA, 25 bp, Probe sequence
gtaaaagttcatgcgtcagtgaatt

SEQ ID NO: 278037 - DNA, 25 bp, Probe sequence
ggtaaaagttcatgcgtcagtgaat

SEQ ID NO: 278038 - DNA, 25 bp, Probe sequence
tggtaaaagttcatgcgtcagtgaa

SEQ ID NO: 278039 - DNA, 25 bp, Probe sequence
tgaattgtgtaagtttttcaaaaag

SEQ ID NO: 278040 - DNA, 25 bp, Probe sequence
tcagtgaattgtgtaagtttttcaa

SEQ ID NO: 278041 - DNA, 25 bp, Probe sequence
tgaatgtgctgataatgatttactc

SEQ ID NO: 278042 - DNA, 25 bp, Probe sequence
tgcgtcagtgaattgtgtaagtttt

SEQ ID NO: 278043 - DNA, 25 bp, Probe sequence
tcatgcgtcagtgaattgtgtaagt

SEQ ID NO: 278044 - DNA, 25 bp, Probe sequence
taaaagttcatgcgtcagtgaattg

SEQ ID NO: 278045 - DNA, 25 bp, Probe sequence
tttggtaaaagttcatgcgtcagtg

SEQ ID NO: 278046 - DNA, 25 bp, Probe sequence
ttcatgcgtcagtgaattgtgtaag

SEQ ID NO: 278047 - DNA, 25 bp, Probe sequence
ttttggtaaaagttcatgcgtcagt

SEQ ID NO: 278048 - DNA, 25 bp, Probe sequence
ttggtaaaagttcatgcgtcagtga

SEQ ID NO: 278049 - DNA, 25 bp, Probe sequence
attaggcaaagaatcgaatcccttc

SEQ ID NO: 278050 - DNA, 25 bp, Probe sequence
attaattttaattcaatagcaaagg

SEQ ID NO: 278051 - DNA, 25 bp, Probe sequence
atcatggctttataaggaacacgat

SEQ ID NO: 278052 - DNA, 25 bp, Probe sequence
atcgaatcccttcgtgagcgtcaaa

SEQ ID NO: 278053 - DNA, 25 bp, Probe sequence
atcccttcgtgagcgtcaaataaca

SEQ ID NO: 278054 - DNA, 25 bp, Probe sequence
atgtagtctcaaaacccaagaaaag

SEQ ID NO: 278055 - DNA, 25 bp, Probe sequence
atgtttctaaatcatggctttataa

SEQ ID NO: 278056 - DNA, 25 bp, Probe sequence
aggcaaagaatcgaatcccttcgtg

SEQ ID NO: 278057 - DNA, 25 bp, Probe sequence
agaatcgaatcccttcgtgagcgtc

SEQ ID NO: 278058 - DNA, 25 bp, Probe sequence
acagaaattgtacgtttggcgaagc

SEQ ID NO: 278059 - DNA, 25 bp, Probe sequence
aaatcatggctttataaggaacacg

SEQ ID NO: 278060 - DNA, 25 bp, Probe sequence
aaagaatcgaatcccttcgtgagcg

SEQ ID NO: 278061 - DNA, 25 bp, Probe sequence
aagaatcgaatcccttcgtgagcgt

SEQ ID NO: 278062 - DNA, 25 bp, Probe sequence
aatcccttcgtgagcgtcaaataac

SEQ ID NO: 278063 - DNA, 25 bp, Probe sequence
aaggaacacgatattaggcaaagaa

SEQ ID NO: 278064 - DNA, 25 bp, Probe sequence
caaatgtagtctcaaaacccaagaa

SEQ ID NO: 278065 - DNA, 25 bp, Probe sequence
caacagaaattgtacgtttggcgaa

SEQ ID NO: 278066 - DNA, 25 bp, Probe sequence
caaagaatcgaatcccttcgtgagc

SEQ ID NO: 278067 - DNA, 25 bp, Probe sequence
catggctttataaggaacacgatat

SEQ ID NO: 278068 - DNA, 25 bp, Probe sequence
gcaaagaatcgaatcccttcgtgag

SEQ ID NO: 278069 - DNA, 25 bp, Probe sequence
gaatcccttcgtgagcgtcaaataa

SEQ ID NO: 278070 - DNA, 25 bp, Probe sequence
gaaaaagtagacaaagcgatttcta

SEQ ID NO: 278071 - DNA, 25 bp, Probe sequence
gatattaggcaaagaatcgaatccc

SEQ ID NO: 278072 - DNA, 25 bp, Probe sequence
gttctcgttcggaggaaatccttat

SEQ ID NO: 278073 - DNA, 25 bp, Probe sequence
gtttctaaatcatggctttataagg

SEQ ID NO: 278074 - DNA, 25 bp, Probe sequence
gtagacaaagcgatttctaaatttt

SEQ ID NO: 278075 - DNA, 25 bp, Probe sequence
ggaacacgatattaggcaaagaatc

SEQ ID NO: 278076 - DNA, 25 bp, Probe sequence
ggcaaagaatcgaatcccttcgtga

SEQ ID NO: 278077 - DNA, 25 bp, Probe sequence
ggctttataaggaacacgatattag

SEQ ID NO: 278078 - DNA, 25 bp, Probe sequence
tctcaaaacccaagaaaagttctcg

SEQ ID NO: 278079 - DNA, 25 bp, Probe sequence
tcgaatcccttcgtgagcgtcaaat

SEQ ID NO: 278080 - DNA, 25 bp, Probe sequence
taatgtttctaaatcatggctttat

SEQ ID NO: 278081 - DNA, 25 bp, Probe sequence
taggcaaagaatcgaatcccttcgt

SEQ ID NO: 278082 - DNA, 25 bp, Probe sequence
ttcaaaaattatatggagatctgta

SEQ ID NO: 278083 - DNA, 25 bp, Probe sequence
atttagatcctttcactggagagaa

SEQ ID NO: 278084 - DNA, 25 bp, Probe sequence
atatttagatcctttcactggagag

SEQ ID NO: 278085 - DNA, 25 bp, Probe sequence
atatgttagttagtataccacccaa

SEQ ID NO: 278086 - DNA, 25 bp, Probe sequence
atcatcatttgttggctatttaaaa

SEQ ID NO: 278087 - DNA, 25 bp, Probe sequence
atcatttgttggctatttaaaagga

SEQ ID NO: 278088 - DNA, 25 bp, Probe sequence
atgtcatctgacacaaacagtttag

SEQ ID NO: 278089 - DNA, 25 bp, Probe sequence
agatcctttcactggagagaaaaat

SEQ ID NO: 278090 - DNA, 25 bp, Probe sequence
acttggggtatcatcatttgttggc

SEQ ID NO: 278091 - DNA, 25 bp, Probe sequence
aagaatatttagatcctttcactgg

SEQ ID NO: 278092 - DNA, 25 bp, Probe sequence
aattacaagaggatatcgttgcaga

SEQ ID NO: 278093 - DNA, 25 bp, Probe sequence
catattgtctttgcacctaaataca

SEQ ID NO: 278094 - DNA, 25 bp, Probe sequence
ctttgcacctaaatacagaagacaa

SEQ ID NO: 278095 - DNA, 25 bp, Probe sequence
ctgacacaaacagtttagcacatac

SEQ ID NO: 278096 - DNA, 25 bp, Probe sequence
gaatatttagatcctttcactggag

SEQ ID NO: 278097 - DNA, 25 bp, Probe sequence
gaaaattatattcgtaatcaattac

SEQ ID NO: 278098 - DNA, 25 bp, Probe sequence
gatagacatgctaacttaaagtata

SEQ ID NO: 278099 - DNA, 25 bp, Probe sequence
gatatttgatagacatgctaactta

SEQ ID NO: 278100 - DNA, 25 bp, Probe sequence
gtatcatcatttgttggctatttaa

SEQ ID NO: 278101 - DNA, 25 bp, Probe sequence
gtaaagatcatatccatatgttagt

SEQ ID NO: 278102 - DNA, 25 bp, Probe sequence
gtcatctgacacaaacagtttagca

SEQ ID NO: 278103 - DNA, 25 bp, Probe sequence
gggtatcatcatttgttggctattt

SEQ ID NO: 278104 - DNA, 25 bp, Probe sequence
ggggtatcatcatttgttggctatt

SEQ ID NO: 278105 - DNA, 25 bp, Probe sequence
ggtgtaaaggattttatgtggatac

SEQ ID NO: 278106 - DNA, 25 bp, Probe sequence
ggtgtagagataattgaagcagagg

SEQ ID NO: 278107 - DNA, 25 bp, Probe sequence
ggattttatgtggatacagtaggta

SEQ ID NO: 278108 - DNA, 25 bp, Probe sequence
ggaagaatatttagatcctttcact

SEQ ID NO: 278109 - DNA, 25 bp, Probe sequence
tgttagttagtataccacccaaact

SEQ ID NO: 278110 - DNA, 25 bp, Probe sequence
taccacccaaacttggggtatcatc

SEQ ID NO: 278111 - DNA, 25 bp, Probe sequence
tagttagtataccacccaaacttgg

SEQ ID NO: 278112 - DNA, 25 bp, Probe sequence
tatgttagttagtataccacccaaa

SEQ ID NO: 278113 - DNA, 25 bp, Probe sequence
tataccacccaaacttggggtatca

SEQ ID NO: 278114 - DNA, 25 bp, Probe sequence
tattgtctttgcacctaaatacaga

SEQ ID NO: 278115 - DNA, 25 bp, Probe sequence
ttggggtatcatcatttgttggcta

SEQ ID NO: 278116 - DNA, 25 bp, Probe sequence
ttgtctttgcacctaaatacagaag

SEQ ID NO: 278117 - DNA, 25 bp, Probe sequence
atagggaatagacgcgatgatcgca

SEQ ID NO: 278118 - DNA, 25 bp, Probe sequence
atgttcagtctgatgattatcatgg

SEQ ID NO: 278119 - DNA, 25 bp, Probe sequence
atgtataatccattcgacgaagctt

SEQ ID NO: 278120 - DNA, 25 bp, Probe sequence
agtgctgatatatttttaggtgttc

SEQ ID NO: 278121 - DNA, 25 bp, Probe sequence
agcaagaccctgaatttaacgagca

SEQ ID NO: 278122 - DNA, 25 bp, Probe sequence
agcatggaatcctactgaaatcgat

SEQ ID NO: 278123 - DNA, 25 bp, Probe sequence
aactctcgacgtcacattgtttcag

SEQ ID NO: 278124 - DNA, 25 bp, Probe sequence
aattatgaatcacaccctgctatta

SEQ ID NO: 278125 - DNA, 25 bp, Probe sequence
caattgcgtttcgatttaaccaaag

SEQ ID NO: 278126 - DNA, 25 bp, Probe sequence
cacaccctgctattaaagcacctat

SEQ ID NO: 278127 - DNA, 25 bp, Probe sequence
cgttcccagcaagaccctgaattta

SEQ ID NO: 278128 - DNA, 25 bp, Probe sequence
cgcacacataccgggacaatttcca

SEQ ID NO: 278129 - DNA, 25 bp, Probe sequence
ccaccttgccacacaatgtttcaat

SEQ ID NO: 278130 - DNA, 25 bp, Probe sequence
gccacacaatgtttcaattttacgt

SEQ ID NO: 278131 - DNA, 25 bp, Probe sequence
gctattaaagcacctattgcggtat

SEQ ID NO: 278132 - DNA, 25 bp, Probe sequence
gctttactgacacatcttgttgcaa

SEQ ID NO: 278133 - DNA, 25 bp, Probe sequence
gcaagttatgctttactgacacatc

SEQ ID NO: 278134 - DNA, 25 bp, Probe sequence
gaatgtggacttgaggtgggtgaat

SEQ ID NO: 278135 - DNA, 25 bp, Probe sequence
gacgaagcttatcatggcttatgcg

SEQ ID NO: 278136 - DNA, 25 bp, Probe sequence
gacgtcacattgtttcagcatggaa

SEQ ID NO: 278137 - DNA, 25 bp, Probe sequence
gacgcgatgatcgcacacataccgg

SEQ ID NO: 278138 - DNA, 25 bp, Probe sequence
gagatagttatctaccacctcaatt

SEQ ID NO: 278139 - DNA, 25 bp, Probe sequence
gatacaaacattcaatacctactta

SEQ ID NO: 278140 - DNA, 25 bp, Probe sequence
gattcaatggcattaccaccttgcc

SEQ ID NO: 278141 - DNA, 25 bp, Probe sequence
gattttggacatcgttcccagcaag

SEQ ID NO: 278142 - DNA, 25 bp, Probe sequence
gtattctaaacgatgatgcatttgc

SEQ ID NO: 278143 - DNA, 25 bp, Probe sequence
gggacaatttccaaatttgggcatc

SEQ ID NO: 278144 - DNA, 25 bp, Probe sequence
ggatgcaatacatacacaattatca

SEQ ID NO: 278145 - DNA, 25 bp, Probe sequence
ggaccagacatgacagattttggac

SEQ ID NO: 278146 - DNA, 25 bp, Probe sequence
ggcaacttagggaatgtttatggta

SEQ ID NO: 278147 - DNA, 25 bp, Probe sequence
taaaaccaatccaaactctcgacgt

SEQ ID NO: 278148 - DNA, 25 bp, Probe sequence
tatctaccacctcaattaaaaatta

SEQ ID NO: 278149 - DNA, 25 bp, Probe sequence
ttaggtgttcctttcaatattgcaa

SEQ ID NO: 278150 - DNA, 25 bp, Probe sequence
ttgggcatcaattgcgtttcgattt

SEQ ID NO: 278151 - DNA, 25 bp, Probe sequence
attggtcttgcatttgttatgtctc

SEQ ID NO: 278152 - DNA, 25 bp, Probe sequence
atttgttatgtctcctttaagatgt

SEQ ID NO: 278153 - DNA, 25 bp, Probe sequence
atgatattttagttgtagttttact

SEQ ID NO: 278154 - DNA, 25 bp, Probe sequence
atgattggtcttgcatttgttatgt

SEQ ID NO: 278155 - DNA, 25 bp, Probe sequence
aggttatgatattttagttgtagtt

SEQ ID NO: 278156 - DNA, 25 bp, Probe sequence
aaaggttatgatattttagttgtag

SEQ ID NO: 278157 - DNA, 25 bp, Probe sequence
aaggttatgatattttagttgtagt

SEQ ID NO: 278158 - DNA, 25 bp, Probe sequence
catttgttatgtctcctttaagatg

SEQ ID NO: 278159 - DNA, 25 bp, Probe sequence
cttgcatttgttatgtctcctttaa

SEQ ID NO: 278160 - DNA, 25 bp, Probe sequence
ctgaaaggttatgatattttagttg

SEQ ID NO: 278161 - DNA, 25 bp, Probe sequence
gcatttgttatgtctcctttaagat

SEQ ID NO: 278162 - DNA, 25 bp, Probe sequence
gaaaggttatgatattttagttgta

SEQ ID NO: 278163 - DNA, 25 bp, Probe sequence
gattggtcttgcatttgttatgtct

SEQ ID NO: 278164 - DNA, 25 bp, Probe sequence
gttatgatattttagttgtagtttt

SEQ ID NO: 278165 - DNA, 25 bp, Probe sequence
gtagttttactaattttaatgattg

SEQ ID NO: 278166 - DNA, 25 bp, Probe sequence
gtcttgcatttgttatgtctccttt

SEQ ID NO: 278167 - DNA, 25 bp, Probe sequence
ggtcttgcatttgttatgtctcctt

SEQ ID NO: 278168 - DNA, 25 bp, Probe sequence
ggttatgatattttagttgtagttt

SEQ ID NO: 278169 - DNA, 25 bp, Probe sequence
tggtcttgcatttgttatgtctcct

SEQ ID NO: 278170 - DNA, 25 bp, Probe sequence
tgattggtcttgcatttgttatgtc

SEQ ID NO: 278171 - DNA, 25 bp, Probe sequence
tgatattttagttgtagttttacta

SEQ ID NO: 278172 - DNA, 25 bp, Probe sequence
tgaaaggttatgatattttagttgt

SEQ ID NO: 278173 - DNA, 25 bp, Probe sequence
tgcatttgttatgtctcctttaaga

SEQ ID NO: 278174 - DNA, 25 bp, Probe sequence
tcttgcatttgttatgtctccttta

SEQ ID NO: 278175 - DNA, 25 bp, Probe sequence
tagttttactaattttaatgattgg

SEQ ID NO: 278176 - DNA, 25 bp, Probe sequence
tatgatattttagttgtagttttac

SEQ ID NO: 278177 - DNA, 25 bp, Probe sequence
tttgttatgtctcctttaagatgtt

SEQ ID NO: 278178 - DNA, 25 bp, Probe sequence
ttttactaattttaatgattggtct

SEQ ID NO: 278179 - DNA, 25 bp, Probe sequence
ttatgatattttagttgtagtttta

SEQ ID NO: 278180 - DNA, 25 bp, Probe sequence
ttgcatttgttatgtctcctttaag

SEQ ID NO: 278181 - DNA, 25 bp, Probe sequence
ttggtcttgcatttgttatgtctcc

SEQ ID NO: 278182 - DNA, 25 bp, Probe sequence
attccaagctcaattaacactaaaa

SEQ ID NO: 278183 - DNA, 25 bp, Probe sequence
attcgaagcatcagctgaattctca

SEQ ID NO: 278184 - DNA, 25 bp, Probe sequence
attattccaagctcaattaacacta

SEQ ID NO: 278185 - DNA, 25 bp, Probe sequence
atgttaaattcgaagcatcagctga

SEQ ID NO: 278186 - DNA, 25 bp, Probe sequence
atggtttctaaagtgaaaggttcat

SEQ ID NO: 278187 - DNA, 25 bp, Probe sequence
agcatcagctgaattctcaatctca

SEQ ID NO: 278188 - DNA, 25 bp, Probe sequence
agctcaattaacactaaaaacgaag

SEQ ID NO: 278189 - DNA, 25 bp, Probe sequence
agctgaattctcaatctcagaataa

SEQ ID NO: 278190 - DNA, 25 bp, Probe sequence
acgaagcacgtgataaccacttaaa

SEQ ID NO: 278191 - DNA, 25 bp, Probe sequence
acttttgatggtgcacacagtagtt

SEQ ID NO: 278192 - DNA, 25 bp, Probe sequence
actttacttttgatggtgcacacag

SEQ ID NO: 278193 - DNA, 25 bp, Probe sequence
aaaacgaagcacgtgataaccactt

SEQ ID NO: 278194 - DNA, 25 bp, Probe sequence
aactttacttttgatggtgcacaca

SEQ ID NO: 278195 - DNA, 25 bp, Probe sequence
aacgaagcacgtgataaccacttaa

SEQ ID NO: 278196 - DNA, 25 bp, Probe sequence
aagcatcagctgaattctcaatctc

SEQ ID NO: 278197 - DNA, 25 bp, Probe sequence
aatctggtgatttctttggtactga

SEQ ID NO: 278198 - DNA, 25 bp, Probe sequence
caacaattattccaagctcaattaa

SEQ ID NO: 278199 - DNA, 25 bp, Probe sequence
catcagctgaattctcaatctcaga

SEQ ID NO: 278200 - DNA, 25 bp, Probe sequence
ctttacttttgatggtgcacacagt

SEQ ID NO: 278201 - DNA, 25 bp, Probe sequence
cgaagcatcagctgaattctcaatc

SEQ ID NO: 278202 - DNA, 25 bp, Probe sequence
ccaagctcaattaacactaaaaacg

SEQ ID NO: 278203 - DNA, 25 bp, Probe sequence
gctgttgaaggagatattaatgact

SEQ ID NO: 278204 - DNA, 25 bp, Probe sequence
gcatcagctgaattctcaatctcag

SEQ ID NO: 278205 - DNA, 25 bp, Probe sequence
gcacgtgataaccacttaaaatctg

SEQ ID NO: 278206 - DNA, 25 bp, Probe sequence
gaagcacgtgataaccacttaaaat

SEQ ID NO: 278207 - DNA, 25 bp, Probe sequence
gaagcatcagctgaattctcaatct

SEQ ID NO: 278208 - DNA, 25 bp, Probe sequence
gtgataaccacttaaaatctggtga

SEQ ID NO: 278209 - DNA, 25 bp, Probe sequence
tcagctgaattctcaatctcagaat

SEQ ID NO: 278210 - DNA, 25 bp, Probe sequence
taaacatttaatggtttctaaagtg

SEQ ID NO: 278211 - DNA, 25 bp, Probe sequence
tattccaagctcaattaacactaaa

SEQ ID NO: 278212 - DNA, 25 bp, Probe sequence
ttttgatggtgcacacagtagttta

SEQ ID NO: 278213 - DNA, 25 bp, Probe sequence
ttacttttgatggtgcacacagtag

SEQ ID NO: 278214 - DNA, 25 bp, Probe sequence
ttcgaagcatcagctgaattctcaa

SEQ ID NO: 278215 - DNA, 25 bp, Probe sequence
ttgatggtgcacacagtagtttaga

SEQ ID NO: 278216 - DNA, 25 bp, Probe sequence
gagatattaaagggatattttactt

SEQ ID NO: 278217 - DNA, 25 bp, Probe sequence
ggagatattaaagggatattttact

SEQ ID NO: 278218 - DNA, 25 bp, Probe sequence
taacaaggtttataatttgtagtag

SEQ ID NO: 278219 - DNA, 25 bp, Probe sequence
taaagtagtttaagaggagatatta

SEQ ID NO: 278220 - DNA, 25 bp, Probe sequence
tataatttgtagtagttaaagtatt

SEQ ID NO: 278221 - DNA, 25 bp, Probe sequence
atttcatactctttattggtcacgt

SEQ ID NO: 278222 - DNA, 25 bp, Probe sequence
cgggttcgatttcatactctttatt

SEQ ID NO: 278223 - DNA, 25 bp, Probe sequence
ccgggttcgatttcatactctttat

SEQ ID NO: 278224 - DNA, 25 bp, Probe sequence
cgatttcatactctttattggtcac

SEQ ID NO: 278225 - DNA, 25 bp, Probe sequence
gatttcatactctttattggtcacg

SEQ ID NO: 278226 - DNA, 25 bp, Probe sequence
gttcgatttcatactctttattggt

SEQ ID NO: 278227 - DNA, 25 bp, Probe sequence
gggttcgatttcatactctttattg

SEQ ID NO: 278228 - DNA, 25 bp, Probe sequence
ggttcgatttcatactctttattgg

SEQ ID NO: 278229 - DNA, 25 bp, Probe sequence
tccgggttcgatttcatactcttta

SEQ ID NO: 278230 - DNA, 25 bp, Probe sequence
tcgatttcatactctttattggtca

SEQ ID NO: 278231 - DNA, 25 bp, Probe sequence
tctctttttccgggttcgatttcat

SEQ ID NO: 278232 - DNA, 25 bp, Probe sequence
ttttccgggttcgatttcatactct

SEQ ID NO: 278233 - DNA, 25 bp, Probe sequence
tttccgggttcgatttcatactctt

SEQ ID NO: 278234 - DNA, 25 bp, Probe sequence
ttcgatttcatactctttattggtc

SEQ ID NO: 278235 - DNA, 25 bp, Probe sequence
atccgcctattattaacaccaatat

SEQ ID NO: 278236 - DNA, 25 bp, Probe sequence
aatccgcctattattaacaccaata

SEQ ID NO: 278237 - DNA, 25 bp, Probe sequence
ctattattaacaccaatatattaaa

SEQ ID NO: 278238 - DNA, 25 bp, Probe sequence
cgcctattattaacaccaatatatt

SEQ ID NO: 278239 - DNA, 25 bp, Probe sequence
ccgcctattattaacaccaatatat

SEQ ID NO: 278240 - DNA, 25 bp, Probe sequence
cctattattaacaccaatatattaa

SEQ ID NO: 278241 - DNA, 25 bp, Probe sequence
gcctattattaacaccaatatatta

SEQ ID NO: 278242 - DNA, 25 bp, Probe sequence
tccgcctattattaacaccaatata

SEQ ID NO: 278243 - DNA, 25 bp, Probe sequence
taatccgcctattattaacaccaat

SEQ ID NO: 278244 - DNA, 25 bp, Probe sequence
tattattaacaccaatatattaaaa

SEQ ID NO: 278245 - DNA, 25 bp, Probe sequence
ttattaacaccaatatattaaaaat

SEQ ID NO: 278246 - DNA, 25 bp, Probe sequence
attgtgtgcctcctttgataatttt

SEQ ID NO: 278247 - DNA, 25 bp, Probe sequence
gcctcctttgataatttttccgctt

SEQ ID NO: 278248 - DNA, 25 bp, Probe sequence
gtgcctcctttgataatttttccgc

SEQ ID NO: 278249 - DNA, 25 bp, Probe sequence
gtgtgcctcctttgataatttttcc

SEQ ID NO: 278250 - DNA, 25 bp, Probe sequence
tgtgtgcctcctttgataatttttc

SEQ ID NO: 278251 - DNA, 25 bp, Probe sequence
tgtgcctcctttgataatttttccg

SEQ ID NO: 278252 - DNA, 25 bp, Probe sequence
tgataatttttccgctttaatttcg

SEQ ID NO: 278253 - DNA, 25 bp, Probe sequence
tgcctcctttgataatttttccgct

SEQ ID NO: 278254 - DNA, 25 bp, Probe sequence
ttgtgtgcctcctttgataattttt

SEQ ID NO: 278255 - DNA, 25 bp, Probe sequence
atttcaccgttaagccgcttcaatt

SEQ ID NO: 278256 - DNA, 25 bp, Probe sequence
caccgttaagccgcttcaattactt

SEQ ID NO: 278257 - DNA, 25 bp, Probe sequence
tcaccgttaagccgcttcaattact

SEQ ID NO: 278258 - DNA, 25 bp, Probe sequence
tcaattactttttattattcgtaat

SEQ ID NO: 278259 - DNA, 25 bp, Probe sequence
taagccgcttcaattactttttatt

SEQ ID NO: 278260 - DNA, 25 bp, Probe sequence
tacatttcaccgttaagccgcttca

SEQ ID NO: 278261 - DNA, 25 bp, Probe sequence
tttcaccgttaagccgcttcaatta

SEQ ID NO: 278262 - DNA, 25 bp, Probe sequence
ttaagccgcttcaattactttttat

SEQ ID NO: 278263 - DNA, 25 bp, Probe sequence
ttcaccgttaagccgcttcaattac

SEQ ID NO: 278264 - DNA, 25 bp, Probe sequence
cacttctctcttgttttaaattagt

SEQ ID NO: 278265 - DNA, 25 bp, Probe sequence
ctctcttgttttaaattagtttatg

SEQ ID NO: 278266 - DNA, 25 bp, Probe sequence
tgttttaaattagtttatgcccttg

SEQ ID NO: 278267 - DNA, 25 bp, Probe sequence
tctctcttgttttaaattagtttat

SEQ ID NO: 278268 - DNA, 25 bp, Probe sequence
tctcttgttttaaattagtttatgc

SEQ ID NO: 278269 - DNA, 25 bp, Probe sequence
tcacttctctcttgttttaaattag

SEQ ID NO: 278270 - DNA, 25 bp, Probe sequence
tttcacttctctcttgttttaaatt

SEQ ID NO: 278271 - DNA, 25 bp, Probe sequence
ttttcacttctctcttgttttaaat

SEQ ID NO: 278272 - DNA, 25 bp, Probe sequence
ttcacttctctcttgttttaaatta

SEQ ID NO: 278273 - DNA, 25 bp, Probe sequence
agagaccttgcggtctcaatgcggc

SEQ ID NO: 278274 - DNA, 25 bp, Probe sequence
agacataaaaaaaagagaccttgcg

SEQ ID NO: 278275 - DNA, 25 bp, Probe sequence
aaagagaccttgcggtctcaatgcg

SEQ ID NO: 278276 - DNA, 25 bp, Probe sequence
aaaaaagagaccttgcggtctcaat

SEQ ID NO: 278277 - DNA, 25 bp, Probe sequence
aaaagagaccttgcggtctcaatgc

SEQ ID NO: 278278 - DNA, 25 bp, Probe sequence
aaaaagagaccttgcggtctcaatg

SEQ ID NO: 278279 - DNA, 25 bp, Probe sequence
aagagaccttgcggtctcaatgcgg

SEQ ID NO: 278280 - DNA, 25 bp, Probe sequence
aatgcggctcatcgcatccattttt

SEQ ID NO: 278281 - DNA, 25 bp, Probe sequence
caatgcggctcatcgcatccatttt

SEQ ID NO: 278282 - DNA, 25 bp, Probe sequence
ctcaatgcggctcatcgcatccatt

SEQ ID NO: 278283 - DNA, 25 bp, Probe sequence
gacataaaaaaaagagaccttgcgg

SEQ ID NO: 278284 - DNA, 25 bp, Probe sequence
gagaccttgcggtctcaatgcggct

SEQ ID NO: 278285 - DNA, 25 bp, Probe sequence
tcaatgcggctcatcgcatccattt

SEQ ID NO: 278286 - DNA, 25 bp, Probe sequence
tagacataaaaaaaagagaccttgc

SEQ ID NO: 278287 - DNA, 25 bp, Probe sequence
attctatctatgagtcaaattttta

SEQ ID NO: 278288 - DNA, 25 bp, Probe sequence
atctatgagtcaaatttttatatta

SEQ ID NO: 278289 - DNA, 25 bp, Probe sequence
cattctatctatgagtcaaattttt

SEQ ID NO: 278290 - DNA, 25 bp, Probe sequence
ctatctatgagtcaaatttttatat

SEQ ID NO: 278291 - DNA, 25 bp, Probe sequence
ctatgagtcaaatttttatattaaa

SEQ ID NO: 278292 - DNA, 25 bp, Probe sequence
tctatgagtcaaatttttatattaa

SEQ ID NO: 278293 - DNA, 25 bp, Probe sequence
tctatctatgagtcaaatttttata

SEQ ID NO: 278294 - DNA, 25 bp, Probe sequence
tcattctatctatgagtcaaatttt

SEQ ID NO: 278295 - DNA, 25 bp, Probe sequence
tatgagtcaaatttttatattaaat

SEQ ID NO: 278296 - DNA, 25 bp, Probe sequence
tatctatgagtcaaatttttatatt

SEQ ID NO: 278297 - DNA, 25 bp, Probe sequence
ttctatctatgagtcaaatttttat

SEQ ID NO: 278298 - DNA, 25 bp, Probe sequence
attttaacatgaattagcaacataa

SEQ ID NO: 278299 - DNA, 25 bp, Probe sequence
atgaattagcaacataatcctaatt

SEQ ID NO: 278300 - DNA, 25 bp, Probe sequence
acatgaattagcaacataatcctaa

SEQ ID NO: 278301 - DNA, 25 bp, Probe sequence
aacatgaattagcaacataatccta

SEQ ID NO: 278302 - DNA, 25 bp, Probe sequence
aattttaacatgaattagcaacata

SEQ ID NO: 278303 - DNA, 25 bp, Probe sequence
catgaattagcaacataatcctaat

SEQ ID NO: 278304 - DNA, 25 bp, Probe sequence
taacatgaattagcaacataatcct

SEQ ID NO: 278305 - DNA, 25 bp, Probe sequence
tttaacatgaattagcaacataatc

SEQ ID NO: 278306 - DNA, 25 bp, Probe sequence
ttttaacatgaattagcaacataat

SEQ ID NO: 278307 - DNA, 25 bp, Probe sequence
ttaacatgaattagcaacataatcc

SEQ ID NO: 278308 - DNA, 25 bp, Probe sequence
atctctccttaaacctctttattgg

SEQ ID NO: 278309 - DNA, 25 bp, Probe sequence
ctttattggtaactctttattatat

SEQ ID NO: 278310 - DNA, 25 bp, Probe sequence
ctctttattggtaactctttattat

SEQ ID NO: 278311 - DNA, 25 bp, Probe sequence
gtaactctttattatattttaacat

SEQ ID NO: 278312 - DNA, 25 bp, Probe sequence
tctctccttaaacctctttattggt

SEQ ID NO: 278313 - DNA, 25 bp, Probe sequence
tctttattggtaactctttattata

SEQ ID NO: 278314 - DNA, 25 bp, Probe sequence
taatctctccttaaacctctttatt

SEQ ID NO: 278315 - DNA, 25 bp, Probe sequence
taactctttattatattttaacatt

SEQ ID NO: 278316 - DNA, 25 bp, Probe sequence
tattggtaactctttattatatttt

SEQ ID NO: 278317 - DNA, 25 bp, Probe sequence
tttattggtaactctttattatatt

SEQ ID NO: 278318 - DNA, 25 bp, Probe sequence
ttattggtaactctttattatattt

SEQ ID NO: 278319 - DNA, 25 bp, Probe sequence
ataatggcctcctttaaaatgatat

SEQ ID NO: 278320 - DNA, 25 bp, Probe sequence
atggcctcctttaaaatgatattta

SEQ ID NO: 278321 - DNA, 25 bp, Probe sequence
aatggcctcctttaaaatgatattt

SEQ ID NO: 278322 - DNA, 25 bp, Probe sequence
tggcctcctttaaaatgatatttaa

SEQ ID NO: 278323 - DNA, 25 bp, Probe sequence
taatggcctcctttaaaatgatatt

SEQ ID NO: 278324 - DNA, 25 bp, Probe sequence
tataatggcctcctttaaaatgata

SEQ ID NO: 278325 - DNA, 25 bp, Probe sequence
atttttgcgaaataaaggagacatg

SEQ ID NO: 278326 - DNA, 25 bp, Probe sequence
atgataagtcatttagagtttttaa

SEQ ID NO: 278327 - DNA, 25 bp, Probe sequence
tgataagtcatttagagtttttaaa

SEQ ID NO: 278328 - DNA, 25 bp, Probe sequence
tttgcgaaataaaggagacatgtta

SEQ ID NO: 278329 - DNA, 25 bp, Probe sequence
ttttgcgaaataaaggagacatgtt

SEQ ID NO: 278330 - DNA, 25 bp, Probe sequence
tttttgcgaaataaaggagacatgt

SEQ ID NO: 278331 - DNA, 25 bp, Probe sequence
atgaatgtctcaactataaactttt

SEQ ID NO: 278332 - DNA, 25 bp, Probe sequence
acatgaatgtctcaactataaactt

SEQ ID NO: 278333 - DNA, 25 bp, Probe sequence
catgaatgtctcaactataaacttt

SEQ ID NO: 278334 - DNA, 25 bp, Probe sequence
gaatgtctcaactataaacttttta

SEQ ID NO: 278335 - DNA, 25 bp, Probe sequence
tgaatgtctcaactataaacttttt

SEQ ID NO: 278336 - DNA, 25 bp, Probe sequence
taaccctattttaaagcaggagtga

SEQ ID NO: 278337 - DNA, 25 bp, Probe sequence
tttaaagcaggagtgaaaaacatac

SEQ ID NO: 278338 - DNA, 25 bp, Probe sequence
ttaaccctattttaaagcaggagtg

SEQ ID NO: 278339 - DNA, 25 bp, Probe sequence
aaatatccctttaatatctcctctt

SEQ ID NO: 278340 - DNA, 25 bp, Probe sequence
aaaatatccctttaatatctcctct

SEQ ID NO: 278341 - DNA, 25 bp, Probe sequence
aatatccctttaatatctcctctta

SEQ ID NO: 278342 - DNA, 25 bp, Probe sequence
ctttaatatctcctcttaaactact

SEQ ID NO: 278343 - DNA, 25 bp, Probe sequence
gtaaaatatccctttaatatctcct

SEQ ID NO: 278344 - DNA, 25 bp, Probe sequence
tccctttaatatctcctcttaaact

SEQ ID NO: 278345 - DNA, 25 bp, Probe sequence
taactactacaaattataaaccttg

SEQ ID NO: 278346 - DNA, 25 bp, Probe sequence
taaaatatccctttaatatctcctc

SEQ ID NO: 278347 - DNA, 25 bp, Probe sequence
tatccctttaatatctcctcttaaa

SEQ ID NO: 278348 - DNA, 25 bp, Probe sequence
attaagattgtccgcttcacatcaa

SEQ ID NO: 278349 - DNA, 25 bp, Probe sequence
actaaattaagattgtccgcttcac

SEQ ID NO: 278350 - DNA, 25 bp, Probe sequence
aaattaagattgtccgcttcacatc

SEQ ID NO: 278351 - DNA, 25 bp, Probe sequence
aactaaattaagattgtccgcttca

SEQ ID NO: 278352 - DNA, 25 bp, Probe sequence
aattaagattgtccgcttcacatca

SEQ ID NO: 278353 - DNA, 25 bp, Probe sequence
ctaaattaagattgtccgcttcaca

SEQ ID NO: 278354 - DNA, 25 bp, Probe sequence
taaactaaattaagattgtccgctt

SEQ ID NO: 278355 - DNA, 25 bp, Probe sequence
taaattaagattgtccgcttcacat

SEQ ID NO: 278356 - DNA, 25 bp, Probe sequence
atatagaaattctagcttattttaa

SEQ ID NO: 278357 - DNA, 25 bp, Probe sequence
aagatatacttataattttagaaag

SEQ ID NO: 278358 - DNA, 25 bp, Probe sequence
tcattcccttttacgttattaacat

SEQ ID NO: 278359 - DNA, 25 bp, Probe sequence
tcatcattcccttttacgttattaa

SEQ ID NO: 278360 - DNA, 25 bp, Probe sequence
tatagaaattctagcttattttaaa

SEQ ID NO: 278361 - DNA, 25 bp, Probe sequence
atcacccttctttttctcaataagt

SEQ ID NO: 278362 - DNA, 25 bp, Probe sequence
cttctttttctcaataagttactat

SEQ ID NO: 278363 - DNA, 25 bp, Probe sequence
tctcaataagttactataccccttt

SEQ ID NO: 278364 - DNA, 25 bp, Probe sequence
tctttttctcaataagttactatac

SEQ ID NO: 278365 - DNA, 25 bp, Probe sequence
tcacccttctttttctcaataagtt

SEQ ID NO: 278366 - DNA, 25 bp, Probe sequence
tatcacccttctttttctcaataag

SEQ ID NO: 278367 - DNA, 25 bp, Probe sequence
tttctcaataagttactatacccct

SEQ ID NO: 278368 - DNA, 25 bp, Probe sequence
ttctcaataagttactatacccctt

SEQ ID NO: 278369 - DNA, 25 bp, Probe sequence
ttctttttctcaataagttactata

SEQ ID NO: 278370 - DNA, 25 bp, Probe sequence
attacaacttttttattatatcata

SEQ ID NO: 278371 - DNA, 25 bp, Probe sequence
acaacttttttattatatcatataa

SEQ ID NO: 278372 - DNA, 25 bp, Probe sequence
aaagataagcaaaaggtggggatag

SEQ ID NO: 278373 - DNA, 25 bp, Probe sequence
aacttttttattatatcatataatt

SEQ ID NO: 278374 - DNA, 25 bp, Probe sequence
aagataagcaaaaggtggggatagg

SEQ ID NO: 278375 - DNA, 25 bp, Probe sequence
aattacaacttttttattatatcat

SEQ ID NO: 278376 - DNA, 25 bp, Probe sequence
caacttttttattatatcatataat

SEQ ID NO: 278377 - DNA, 25 bp, Probe sequence
gaaaagataagcaaaaggtggggat

SEQ ID NO: 278378 - DNA, 25 bp, Probe sequence
taattacaacttttttattatatca

SEQ ID NO: 278379 - DNA, 25 bp, Probe sequence
tacaacttttttattatatcatata

SEQ ID NO: 278380 - DNA, 25 bp, Probe sequence
ttacaacttttttattatatcatat

SEQ ID NO: 278381 - DNA, 25 bp, Probe sequence
acttgtcactccattttataataat

SEQ ID NO: 278382 - DNA, 25 bp, Probe sequence
aacttgtcactccattttataataa

SEQ ID NO: 278383 - DNA, 25 bp, Probe sequence
cttgtcactccattttataataatt

SEQ ID NO: 278384 - DNA, 25 bp, Probe sequence
gtcactccattttataataatttcc

SEQ ID NO: 278385 - DNA, 25 bp, Probe sequence
tgtcactccattttataataatttc

SEQ ID NO: 278386 - DNA, 25 bp, Probe sequence
taataatttccaatttttagaatat

SEQ ID NO: 278387 - DNA, 25 bp, Probe sequence
tataataatttccaatttttagaat

SEQ ID NO: 278388 - DNA, 25 bp, Probe sequence
ttgtcactccattttataataattt

SEQ ID NO: 278389 - DNA, 25 bp, Probe sequence
atatagcattatagtttggactaaa

SEQ ID NO: 278390 - DNA, 25 bp, Probe sequence
atagcattatagtttggactaaaaa

SEQ ID NO: 278391 - DNA, 25 bp, Probe sequence
agcattatagtttggactaaaaatt

SEQ ID NO: 278392 - DNA, 25 bp, Probe sequence
aaatatagcattatagtttggacta

SEQ ID NO: 278393 - DNA, 25 bp, Probe sequence
aatatagcattatagtttggactaa

SEQ ID NO: 278394 - DNA, 25 bp, Probe sequence
gcattatagtttggactaaaaattt

SEQ ID NO: 278395 - DNA, 25 bp, Probe sequence
taaatatagcattatagtttggact

SEQ ID NO: 278396 - DNA, 25 bp, Probe sequence
tagcattatagtttggactaaaaat

SEQ ID NO: 278397 - DNA, 25 bp, Probe sequence
tatagcattatagtttggactaaaa

SEQ ID NO: 278398 - DNA, 25 bp, Probe sequence
acggcaaatgacagtaaaatattta

SEQ ID NO: 278399 - DNA, 25 bp, Probe sequence
aaacggcaaatgacagtaaaatatt

SEQ ID NO: 278400 - DNA, 25 bp, Probe sequence
aaaacggcaaatgacagtaaaatat

SEQ ID NO: 278401 - DNA, 25 bp, Probe sequence
aacggcaaatgacagtaaaatattt

SEQ ID NO: 278402 - DNA, 25 bp, Probe sequence
gataaaaacggcaaatgacagtaaa

SEQ ID NO: 278403 - DNA, 25 bp, Probe sequence
ggcaaatgacagtaaaatatttata

SEQ ID NO: 278404 - DNA, 25 bp, Probe sequence
tgataaaaacggcaaatgacagtaa

SEQ ID NO: 278405 - DNA, 25 bp, Probe sequence
taaaaacggcaaatgacagtaaaat

SEQ ID NO: 278406 - DNA, 25 bp, Probe sequence
catacctaattcagtaattaaataa

SEQ ID NO: 278407 - DNA, 25 bp, Probe sequence
gtcatacctaattcagtaattaaat

SEQ ID NO: 278408 - DNA, 25 bp, Probe sequence
tgtcatacctaattcagtaattaaa

SEQ ID NO: 278409 - DNA, 25 bp, Probe sequence
tcatacctaattcagtaattaaata

SEQ ID NO: 278410 - DNA, 25 bp, Probe sequence
atgagtactattaaaaaggatgtga

SEQ ID NO: 278411 - DNA, 25 bp, Probe sequence
actagaatttaaatgagtactatta

SEQ ID NO: 278412 - DNA, 25 bp, Probe sequence
aaatgagtactattaaaaaggatgt

SEQ ID NO: 278413 - DNA, 25 bp, Probe sequence
aatgagtactattaaaaaggatgtg

SEQ ID NO: 278414 - DNA, 25 bp, Probe sequence
gaaaaaggatatgtaactccgttct

SEQ ID NO: 278415 - DNA, 25 bp, Probe sequence
gagtactattaaaaaggatgtgaaa

SEQ ID NO: 278416 - DNA, 25 bp, Probe sequence
tgagtactattaaaaaggatgtgaa

SEQ ID NO: 278417 - DNA, 25 bp, Probe sequence
atagtataactaatgcttaataggt

SEQ ID NO: 278418 - DNA, 25 bp, Probe sequence
ataactaatgcttaataggtgattt

SEQ ID NO: 278419 - DNA, 25 bp, Probe sequence
agtataactaatgcttaataggtga

SEQ ID NO: 278420 - DNA, 25 bp, Probe sequence
actaatgcttaataggtgatttaat

SEQ ID NO: 278421 - DNA, 25 bp, Probe sequence
aactaatgcttaataggtgatttaa

SEQ ID NO: 278422 - DNA, 25 bp, Probe sequence
aatagtataactaatgcttaatagg

SEQ ID NO: 278423 - DNA, 25 bp, Probe sequence
gtataactaatgcttaataggtgat

SEQ ID NO: 278424 - DNA, 25 bp, Probe sequence
taactaatgcttaataggtgattta

SEQ ID NO: 278425 - DNA, 25 bp, Probe sequence
tagtataactaatgcttaataggtg

SEQ ID NO: 278426 - DNA, 25 bp, Probe sequence
tataactaatgcttaataggtgatt

SEQ ID NO: 278427 - DNA, 25 bp, Probe sequence
cttaaatttggcgaaaagacattgt

SEQ ID NO: 278428 - DNA, 25 bp, Probe sequence
tggcgaaaagacattgtttaaaatt

SEQ ID NO: 278429 - DNA, 25 bp, Probe sequence
taaatttggcgaaaagacattgttt

SEQ ID NO: 278430 - DNA, 25 bp, Probe sequence
ttaaatttggcgaaaagacattgtt

SEQ ID NO: 278431 - DNA, 25 bp, Probe sequence
ttggcgaaaagacattgtttaaaat

SEQ ID NO: 278432 - DNA, 25 bp, Probe sequence
atggtaaactatgaaaatgaaatga

SEQ ID NO: 278433 - DNA, 25 bp, Probe sequence
gaaatgaaaacatgttattataatg

SEQ ID NO: 278434 - DNA, 25 bp, Probe sequence
taatgaataaaacgtttacaaggag

SEQ ID NO: 278435 - DNA, 25 bp, Probe sequence
tatggtaaactatgaaaatgaaatg

SEQ ID NO: 278436 - DNA, 25 bp, Probe sequence
atgttatactaaatacctttgattt

SEQ ID NO: 278437 - DNA, 25 bp, Probe sequence
agaataaagcttgcattttacttgt

SEQ ID NO: 278438 - DNA, 25 bp, Probe sequence
acaatgttatactaaatacctttga

SEQ ID NO: 278439 - DNA, 25 bp, Probe sequence
aaagaataaagcttgcattttactt

SEQ ID NO: 278440 - DNA, 25 bp, Probe sequence
aaaagaataaagcttgcattttact

SEQ ID NO: 278441 - DNA, 25 bp, Probe sequence
aacaatgttatactaaatacctttg

SEQ ID NO: 278442 - DNA, 25 bp, Probe sequence
aagaataaagcttgcattttacttg

SEQ ID NO: 278443 - DNA, 25 bp, Probe sequence
aatgttatactaaatacctttgatt

SEQ ID NO: 278444 - DNA, 25 bp, Probe sequence
caatgttatactaaatacctttgat

SEQ ID NO: 278445 - DNA, 25 bp, Probe sequence
tgttatactaaatacctttgattta

SEQ ID NO: 278446 - DNA, 25 bp, Probe sequence
taaacaatgttatactaaatacctt

SEQ ID NO: 278447 - DNA, 25 bp, Probe sequence
atatatgaattttaagtagagggat

SEQ ID NO: 278448 - DNA, 25 bp, Probe sequence
atatgaattttaagtagagggataa

SEQ ID NO: 278449 - DNA, 25 bp, Probe sequence
atgaattttaagtagagggataaga

SEQ ID NO: 278450 - DNA, 25 bp, Probe sequence
aatatatgaattttaagtagaggga

SEQ ID NO: 278451 - DNA, 25 bp, Probe sequence
tatgaattttaagtagagggataag

SEQ ID NO: 278452 - DNA, 25 bp, Probe sequence
tatatgaattttaagtagagggata

SEQ ID NO: 278453 - DNA, 25 bp, Probe sequence
ataattttattgggatgagtgacct

SEQ ID NO: 278454 - DNA, 25 bp, Probe sequence
aaataattttattgggatgagtgac

SEQ ID NO: 278455 - DNA, 25 bp, Probe sequence
aataattttattgggatgagtgacc

SEQ ID NO: 278456 - DNA, 25 bp, Probe sequence
aattttattgggatgagtgacctat

SEQ ID NO: 278457 - DNA, 25 bp, Probe sequence
taattttattgggatgagtgaccta

SEQ ID NO: 278458 - DNA, 25 bp, Probe sequence
caacctcaaagtttgtcttattgta

SEQ ID NO: 278459 - DNA, 25 bp, Probe sequence
cccaacctcaaagtttgtcttattg

SEQ ID NO: 278460 - DNA, 25 bp, Probe sequence
cctcaaagtttgtcttattgtaaat

SEQ ID NO: 278461 - DNA, 25 bp, Probe sequence
ccaacctcaaagtttgtcttattgt

SEQ ID NO: 278462 - DNA, 25 bp, Probe sequence
tcccaacctcaaagtttgtcttatt

SEQ ID NO: 278463 - DNA, 25 bp, Probe sequence
ttcccaacctcaaagtttgtcttat

SEQ ID NO: 278464 - DNA, 25 bp, Probe sequence
atagacggcttattagtcgtctttt

SEQ ID NO: 278465 - DNA, 25 bp, Probe sequence
aatagacggcttattagtcgtcttt

SEQ ID NO: 278466 - DNA, 25 bp, Probe sequence
gacggcttattagtcgtctttttat

SEQ ID NO: 278467 - DNA, 25 bp, Probe sequence
tagacggcttattagtcgtcttttt

SEQ ID NO: 278468 - DNA, 25 bp, Probe sequence
ctcctcaaaattggcaaaaaataat

SEQ ID NO: 278469 - DNA, 25 bp, Probe sequence
gtaggcgagctacccgaaatttcgc

SEQ ID NO: 278470 - DNA, 25 bp, Probe sequence
gtgttccctcctcaaaattggcaaa

SEQ ID NO: 278471 - DNA, 25 bp, Probe sequence
ggtaggcgagctacccgaaatttcg

SEQ ID NO: 278472 - DNA, 25 bp, Probe sequence
tgttccctcctcaaaattggcaaaa

SEQ ID NO: 278473 - DNA, 25 bp, Probe sequence
tccctcctcaaaattggcaaaaaat

SEQ ID NO: 278474 - DNA, 25 bp, Probe sequence
taggcgagctacccgaaatttcgca

SEQ ID NO: 278475 - DNA, 25 bp, Probe sequence
atgactaaacaaatggaggtttatc

SEQ ID NO: 278476 - DNA, 25 bp, Probe sequence
actaaacaaatggaggtttatcatt

SEQ ID NO: 278477 - DNA, 25 bp, Probe sequence
aatatgactaaacaaatggaggttt

SEQ ID NO: 278478 - DNA, 25 bp, Probe sequence
ctaaacaaatggaggtttatcattt

SEQ ID NO: 278479 - DNA, 25 bp, Probe sequence
gaacgaaaatgaaatatgactaaac

SEQ ID NO: 278480 - DNA, 25 bp, Probe sequence
gaaatatgactaaacaaatggaggt

SEQ ID NO: 278481 - DNA, 25 bp, Probe sequence
gactaaacaaatggaggtttatcat

SEQ ID NO: 278482 - DNA, 25 bp, Probe sequence
tgactaaacaaatggaggtttatca

SEQ ID NO: 278483 - DNA, 25 bp, Probe sequence
attattatgcaaatgatgttgatca

SEQ ID NO: 278484 - DNA, 25 bp, Probe sequence
agattattatgcaaatgatgttgat

SEQ ID NO: 278485 - DNA, 25 bp, Probe sequence
aagattattatgcaaatgatgttga

SEQ ID NO: 278486 - DNA, 25 bp, Probe sequence
gattattatgcaaatgatgttgatc

SEQ ID NO: 278487 - DNA, 25 bp, Probe sequence
agataaaatggacagtggagggcaa

SEQ ID NO: 278488 - DNA, 25 bp, Probe sequence
aagataaaatggacagtggagggca

SEQ ID NO: 278489 - DNA, 25 bp, Probe sequence
gataaaatggacagtggagggcaat

SEQ ID NO: 278490 - DNA, 25 bp, Probe sequence
atacatatttttttaggaggcaaag

SEQ ID NO: 278491 - DNA, 25 bp, Probe sequence
aaatattgcatttatagagaataga

SEQ ID NO: 278492 - DNA, 25 bp, Probe sequence
aaaatattgcatttatagagaatag

SEQ ID NO: 278493 - DNA, 25 bp, Probe sequence
aatattgcatttatagagaatagaa

SEQ ID NO: 278494 - DNA, 25 bp, Probe sequence
tacatatttttttaggaggcaaagt

SEQ ID NO: 278495 - DNA, 25 bp, Probe sequence
ataatagagaattcgttatttaggg

SEQ ID NO: 278496 - DNA, 25 bp, Probe sequence
taatagagaattcgttatttagggg

SEQ ID NO: 278497 - DNA, 25 bp, Probe sequence
tagagaattcgttatttagggggag

SEQ ID NO: 278498 - DNA, 25 bp, Probe sequence
atgtgatagacattaccgtttttta

SEQ ID NO: 278499 - DNA, 25 bp, Probe sequence
acggtaatgtcttttttaatgtgat

SEQ ID NO: 278500 - DNA, 25 bp, Probe sequence
aatgtcttttttaatgtgatagaca

SEQ ID NO: 278501 - DNA, 25 bp, Probe sequence
cggtaatgtcttttttaatgtgata

SEQ ID NO: 278502 - DNA, 25 bp, Probe sequence
gatagacattaccgttttttagtgg

SEQ ID NO: 278503 - DNA, 25 bp, Probe sequence
gtaatgtcttttttaatgtgataga

SEQ ID NO: 278504 - DNA, 25 bp, Probe sequence
gtgatagacattaccgttttttagt

SEQ ID NO: 278505 - DNA, 25 bp, Probe sequence
ggtaatgtcttttttaatgtgatag

SEQ ID NO: 278506 - DNA, 25 bp, Probe sequence
tgtgatagacattaccgttttttag

SEQ ID NO: 278507 - DNA, 25 bp, Probe sequence
tgatagacattaccgttttttagtg

SEQ ID NO: 278508 - DNA, 25 bp, Probe sequence
taatgtcttttttaatgtgatagac

SEQ ID NO: 278509 - DNA, 25 bp, Probe sequence
attatggagtaaaggggcatatttt

SEQ ID NO: 278510 - DNA, 25 bp, Probe sequence
atattatggagtaaaggggcatatt

SEQ ID NO: 278511 - DNA, 25 bp, Probe sequence
ataaatattatggagtaaaggggca

SEQ ID NO: 278512 - DNA, 25 bp, Probe sequence
aatattatggagtaaaggggcatat

SEQ ID NO: 278513 - DNA, 25 bp, Probe sequence
taaatattatggagtaaaggggcat

SEQ ID NO: 278514 - DNA, 25 bp, Probe sequence
tattatggagtaaaggggcatattt

SEQ ID NO: 278515 - DNA, 25 bp, Probe sequence
atagatgggaaaatattaggttctt

SEQ ID NO: 278516 - DNA, 25 bp, Probe sequence
atgacttacctaatagatgggaaaa

SEQ ID NO: 278517 - DNA, 25 bp, Probe sequence
acttacctaatagatgggaaaatat

SEQ ID NO: 278518 - DNA, 25 bp, Probe sequence
gacttacctaatagatgggaaaata

SEQ ID NO: 278519 - DNA, 25 bp, Probe sequence
tgacttacctaatagatgggaaaat

SEQ ID NO: 278520 - DNA, 25 bp, Probe sequence
tagatgggaaaatattaggttcttt

SEQ ID NO: 278521 - DNA, 25 bp, Probe sequence
aatttcataaagtgttcaaaataat

SEQ ID NO: 278522 - DNA, 25 bp, Probe sequence
gttgtataaattaaagattgagtca

SEQ ID NO: 278523 - DNA, 25 bp, Probe sequence
gtataaattaaagattgagtcaata

SEQ ID NO: 278524 - DNA, 25 bp, Probe sequence
tgttcaaaataatttttcgctttag

SEQ ID NO: 278525 - DNA, 25 bp, Probe sequence
tcaaaataatttttcgctttagttg

SEQ ID NO: 278526 - DNA, 25 bp, Probe sequence
ttcgctttagttgtataaattaaag

SEQ ID NO: 278527 - DNA, 25 bp, Probe sequence
atcaaatttcccaagaaataattag

SEQ ID NO: 278528 - DNA, 25 bp, Probe sequence
aagaaataattaggttcttcatatt

SEQ ID NO: 278529 - DNA, 25 bp, Probe sequence
caagaaataattaggttcttcatat

SEQ ID NO: 278530 - DNA, 25 bp, Probe sequence
cccaagaaataattaggttcttcat

SEQ ID NO: 278531 - DNA, 25 bp, Probe sequence
ccaagaaataattaggttcttcata

SEQ ID NO: 278532 - DNA, 25 bp, Probe sequence
tcccaagaaataattaggttcttca

SEQ ID NO: 278533 - DNA, 25 bp, Probe sequence
tcaaatttcccaagaaataattagg

SEQ ID NO: 278534 - DNA, 25 bp, Probe sequence
taaatcaaatttcccaagaaataat

SEQ ID NO: 278535 - DNA, 25 bp, Probe sequence
aaatagtgattgcaaaagcgccccc

SEQ ID NO: 278536 - DNA, 25 bp, Probe sequence
aaaatagtgattgcaaaagcgcccc

SEQ ID NO: 278537 - DNA, 25 bp, Probe sequence
aatagtgattgcaaaagcgcccccg

SEQ ID NO: 278538 - DNA, 25 bp, Probe sequence
gcgcccccgtatatctaaaataact

SEQ ID NO: 278539 - DNA, 25 bp, Probe sequence
atagacactaagaaagggaggctat

SEQ ID NO: 278540 - DNA, 25 bp, Probe sequence
agacactaagaaagggaggctatta

SEQ ID NO: 278541 - DNA, 25 bp, Probe sequence
acactaagaaagggaggctattagt

SEQ ID NO: 278542 - DNA, 25 bp, Probe sequence
gacactaagaaagggaggctattag

SEQ ID NO: 278543 - DNA, 25 bp, Probe sequence
gatagacactaagaaagggaggcta

SEQ ID NO: 278544 - DNA, 25 bp, Probe sequence
tgatagacactaagaaagggaggct

SEQ ID NO: 278545 - DNA, 25 bp, Probe sequence
taagaaagggaggctattagtaata

SEQ ID NO: 278546 - DNA, 25 bp, Probe sequence
tagacactaagaaagggaggctatt

SEQ ID NO: 278547 - DNA, 25 bp, Probe sequence
atcaatttcaaaatacttgagaata

SEQ ID NO: 278548 - DNA, 25 bp, Probe sequence
accaatcaatttcaaaatacttgag

SEQ ID NO: 278549 - DNA, 25 bp, Probe sequence
aaccaatcaatttcaaaatacttga

SEQ ID NO: 278550 - DNA, 25 bp, Probe sequence
aatcaatttcaaaatacttgagaat

SEQ ID NO: 278551 - DNA, 25 bp, Probe sequence
caatcaatttcaaaatacttgagaa

SEQ ID NO: 278552 - DNA, 25 bp, Probe sequence
cagttgcgacccatataaattttaa

SEQ ID NO: 278553 - DNA, 25 bp, Probe sequence
ccaatcaatttcaaaatacttgaga

SEQ ID NO: 278554 - DNA, 25 bp, Probe sequence
gtaaccaatcaatttcaaaatactt

SEQ ID NO: 278555 - DNA, 25 bp, Probe sequence
tcaatttcaaaatacttgagaataa

SEQ ID NO: 278556 - DNA, 25 bp, Probe sequence
taaccaatcaatttcaaaatacttg

SEQ ID NO: 278557 - DNA, 25 bp, Probe sequence
atgctaacataagtttgtaaaattc

SEQ ID NO: 278558 - DNA, 25 bp, Probe sequence
ctatgctaacataagtttgtaaaat

SEQ ID NO: 278559 - DNA, 25 bp, Probe sequence
gctaacataagtttgtaaaattcgt

SEQ ID NO: 278560 - DNA, 25 bp, Probe sequence
tgctaacataagtttgtaaaattcg

SEQ ID NO: 278561 - DNA, 25 bp, Probe sequence
tctatgctaacataagtttgtaaaa

SEQ ID NO: 278562 - DNA, 25 bp, Probe sequence
tatgctaacataagtttgtaaaatt

SEQ ID NO: 278563 - DNA, 25 bp, Probe sequence
tttctatgctaacataagtttgtaa

SEQ ID NO: 278564 - DNA, 25 bp, Probe sequence
ttctatgctaacataagtttgtaaa

SEQ ID NO: 278565 - DNA, 25 bp, Probe sequence
aggtgtaatgatgtaaaaagatata

SEQ ID NO: 278566 - DNA, 25 bp, Probe sequence
aaatattttaaggtgtaatgatgta

SEQ ID NO: 278567 - DNA, 25 bp, Probe sequence
aaggtgtaatgatgtaaaaagatat

SEQ ID NO: 278568 - DNA, 25 bp, Probe sequence
aatattttaaggtgtaatgatgtaa

SEQ ID NO: 278569 - DNA, 25 bp, Probe sequence
ggtgtaatgatgtaaaaagatataa

SEQ ID NO: 278570 - DNA, 25 bp, Probe sequence
taaggtgtaatgatgtaaaaagata

SEQ ID NO: 278571 - DNA, 25 bp, Probe sequence
atatagaggaagttatacattttaa

SEQ ID NO: 278572 - DNA, 25 bp, Probe sequence
gaagttatacattttaaaaggagca

SEQ ID NO: 278573 - DNA, 25 bp, Probe sequence
tagaggaagttatacattttaaaag

SEQ ID NO: 278574 - DNA, 25 bp, Probe sequence
tatagaggaagttatacattttaaa

SEQ ID NO: 278575 - DNA, 25 bp, Probe sequence
atgaaatcgattcaaggaaacaaaa

SEQ ID NO: 278576 - DNA, 25 bp, Probe sequence
agtatgaaatcgattcaaggaaaca

SEQ ID NO: 278577 - DNA, 25 bp, Probe sequence
gaaatcgattcaaggaaacaaaata

SEQ ID NO: 278578 - DNA, 25 bp, Probe sequence
gagtatgaaatcgattcaaggaaac

SEQ ID NO: 278579 - DNA, 25 bp, Probe sequence
gtatgaaatcgattcaaggaaacaa

SEQ ID NO: 278580 - DNA, 25 bp, Probe sequence
tgaaatcgattcaaggaaacaaaat

SEQ ID NO: 278581 - DNA, 25 bp, Probe sequence
tatgaaatcgattcaaggaaacaaa

SEQ ID NO: 278582 - DNA, 25 bp, Probe sequence
atagaaaaatcgtgtgattatctga

SEQ ID NO: 278583 - DNA, 25 bp, Probe sequence
atcgtgtgattatctgagcgagcct

SEQ ID NO: 278584 - DNA, 25 bp, Probe sequence
agaaaaatcgtgtgattatctgagc

SEQ ID NO: 278585 - DNA, 25 bp, Probe sequence
aaatcgtgtgattatctgagcgagc

SEQ ID NO: 278586 - DNA, 25 bp, Probe sequence
aaaaatcgtgtgattatctgagcga

SEQ ID NO: 278587 - DNA, 25 bp, Probe sequence
aaaatcgtgtgattatctgagcgag

SEQ ID NO: 278588 - DNA, 25 bp, Probe sequence
aatcgtgtgattatctgagcgagcc

SEQ ID NO: 278589 - DNA, 25 bp, Probe sequence
cgtgtgattatctgagcgagcctag

SEQ ID NO: 278590 - DNA, 25 bp, Probe sequence
gaaaaatcgtgtgattatctgagcg

SEQ ID NO: 278591 - DNA, 25 bp, Probe sequence
tcgtgtgattatctgagcgagccta

SEQ ID NO: 278592 - DNA, 25 bp, Probe sequence
tagaaaaatcgtgtgattatctgag

SEQ ID NO: 278593 - DNA, 25 bp, Probe sequence
attggtgttaataataggcggatta

SEQ ID NO: 278594 - DNA, 25 bp, Probe sequence
atattggtgttaataataggcggat

SEQ ID NO: 278595 - DNA, 25 bp, Probe sequence
atatattggtgttaataataggcgg

SEQ ID NO: 278596 - DNA, 25 bp, Probe sequence
tatattggtgttaataataggcgga

SEQ ID NO: 278597 - DNA, 25 bp, Probe sequence
tatttttaatatattggtgttaata

SEQ ID NO: 278598 - DNA, 25 bp, Probe sequence
tattggtgttaataataggcggatt

SEQ ID NO: 278599 - DNA, 25 bp, Probe sequence
ttatttttaatatattggtgttaat

SEQ ID NO: 278600 - DNA, 25 bp, Probe sequence
atatataatacaaaattctcaatat

SEQ ID NO: 278601 - DNA, 25 bp, Probe sequence
atataatacaaaattctcaatataa

SEQ ID NO: 278602 - DNA, 25 bp, Probe sequence
ataatacaaaattctcaatataaaa

SEQ ID NO: 278603 - DNA, 25 bp, Probe sequence
aatacaaaattctcaatataaaaag

SEQ ID NO: 278604 - DNA, 25 bp, Probe sequence
taatacaaaattctcaatataaaaa

SEQ ID NO: 278605 - DNA, 25 bp, Probe sequence
tataatacaaaattctcaatataaa

SEQ ID NO: 278606 - DNA, 25 bp, Probe sequence
tatatataatacaaaattctcaata

SEQ ID NO: 278607 - DNA, 25 bp, Probe sequence
atgattaaaattagacgtgtaaatg

SEQ ID NO: 278608 - DNA, 25 bp, Probe sequence
acaatgattaaaattagacgtgtaa

SEQ ID NO: 278609 - DNA, 25 bp, Probe sequence
aaacaatgattaaaattagacgtgt

SEQ ID NO: 278610 - DNA, 25 bp, Probe sequence
aaaacaatgattaaaattagacgtg

SEQ ID NO: 278611 - DNA, 25 bp, Probe sequence
aacaatgattaaaattagacgtgta

SEQ ID NO: 278612 - DNA, 25 bp, Probe sequence
aatgattaaaattagacgtgtaaat

SEQ ID NO: 278613 - DNA, 25 bp, Probe sequence
caatgattaaaattagacgtgtaaa

SEQ ID NO: 278614 - DNA, 25 bp, Probe sequence
gattaaaattagacgtgtaaatgtt

SEQ ID NO: 278615 - DNA, 25 bp, Probe sequence
tgattaaaattagacgtgtaaatgt

SEQ ID NO: 278616 - DNA, 25 bp, Probe sequence
cggaaaaattatcaaaggaggcaca

SEQ ID NO: 278617 - DNA, 25 bp, Probe sequence
agcggaaaaattatcaaaggaggca

SEQ ID NO: 278618 - DNA, 25 bp, Probe sequence
aaattatcaaaggaggcacacaatc

SEQ ID NO: 278619 - DNA, 25 bp, Probe sequence
aaaaattatcaaaggaggcacacaa

SEQ ID NO: 278620 - DNA, 25 bp, Probe sequence
aaaattatcaaaggaggcacacaat

SEQ ID NO: 278621 - DNA, 25 bp, Probe sequence
gcggaaaaattatcaaaggaggcac

SEQ ID NO: 278622 - DNA, 25 bp, Probe sequence
gaaaaattatcaaaggaggcacaca

SEQ ID NO: 278623 - DNA, 25 bp, Probe sequence
ggaaaaattatcaaaggaggcacac

SEQ ID NO: 278624 - DNA, 25 bp, Probe sequence
attgaagcggcttaacggtgaaatg

SEQ ID NO: 278625 - DNA, 25 bp, Probe sequence
agtaattgaagcggcttaacggtga

SEQ ID NO: 278626 - DNA, 25 bp, Probe sequence
aagtaattgaagcggcttaacggtg

SEQ ID NO: 278627 - DNA, 25 bp, Probe sequence
aattgaagcggcttaacggtgaaat

SEQ ID NO: 278628 - DNA, 25 bp, Probe sequence
gaagcggcttaacggtgaaatgtaa

SEQ ID NO: 278629 - DNA, 25 bp, Probe sequence
gtaattgaagcggcttaacggtgaa

SEQ ID NO: 278630 - DNA, 25 bp, Probe sequence
tgaagcggcttaacggtgaaatgta

SEQ ID NO: 278631 - DNA, 25 bp, Probe sequence
taattgaagcggcttaacggtgaaa

SEQ ID NO: 278632 - DNA, 25 bp, Probe sequence
ttgaagcggcttaacggtgaaatgt

SEQ ID NO: 278633 - DNA, 25 bp, Probe sequence
gatattagtcaacaaaagcaaatat

SEQ ID NO: 278634 - DNA, 25 bp, Probe sequence
tgatattagtcaacaaaagcaaata

SEQ ID NO: 278635 - DNA, 25 bp, Probe sequence
tattagtcaacaaaagcaaatattg

SEQ ID NO: 278636 - DNA, 25 bp, Probe sequence
tattgagaataaagagagttgtgaa

SEQ ID NO: 278637 - DNA, 25 bp, Probe sequence
atataaaaatttgactcatagatag

SEQ ID NO: 278638 - DNA, 25 bp, Probe sequence
ataaaaatttgactcatagatagaa

SEQ ID NO: 278639 - DNA, 25 bp, Probe sequence
aaaaatttgactcatagatagaatg

SEQ ID NO: 278640 - DNA, 25 bp, Probe sequence
aaaatttgactcatagatagaatga

SEQ ID NO: 278641 - DNA, 25 bp, Probe sequence
aatataaaaatttgactcatagata

SEQ ID NO: 278642 - DNA, 25 bp, Probe sequence
taatataaaaatttgactcatagat

SEQ ID NO: 278643 - DNA, 25 bp, Probe sequence
taaaaatttgactcatagatagaat

SEQ ID NO: 278644 - DNA, 25 bp, Probe sequence
tataaaaatttgactcatagataga

SEQ ID NO: 278645 - DNA, 25 bp, Probe sequence
ttaatataaaaatttgactcataga

SEQ ID NO: 278646 - DNA, 25 bp, Probe sequence
ataactataaacataaagagggcat

SEQ ID NO: 278647 - DNA, 25 bp, Probe sequence
actataaacataaagagggcataag

SEQ ID NO: 278648 - DNA, 25 bp, Probe sequence
acatgacatttgctaaaataaaaat

SEQ ID NO: 278649 - DNA, 25 bp, Probe sequence
aactataaacataaagagggcataa

SEQ ID NO: 278650 - DNA, 25 bp, Probe sequence
cacatgacatttgctaaaataaaaa

SEQ ID NO: 278651 - DNA, 25 bp, Probe sequence
ctataaacataaagagggcataagc

SEQ ID NO: 278652 - DNA, 25 bp, Probe sequence
taactataaacataaagagggcata

SEQ ID NO: 278653 - DNA, 25 bp, Probe sequence
tataaacataaagagggcataagcg

SEQ ID NO: 278654 - DNA, 25 bp, Probe sequence
attacaagttaaaatgataagctaa

SEQ ID NO: 278655 - DNA, 25 bp, Probe sequence
agaccacaaaaaaatagcttatcac

SEQ ID NO: 278656 - DNA, 25 bp, Probe sequence
accacaaaaaaatagcttatcactt

SEQ ID NO: 278657 - DNA, 25 bp, Probe sequence
cacaaaaaaatagcttatcactttt

SEQ ID NO: 278658 - DNA, 25 bp, Probe sequence
ccacaaaaaaatagcttatcacttt

SEQ ID NO: 278659 - DNA, 25 bp, Probe sequence
gaccacaaaaaaatagcttatcact

SEQ ID NO: 278660 - DNA, 25 bp, Probe sequence
tagaccacaaaaaaatagcttatca

SEQ ID NO: 278661 - DNA, 25 bp, Probe sequence
ttagaccacaaaaaaatagcttatc

SEQ ID NO: 278662 - DNA, 25 bp, Probe sequence
ttacaagttaaaatgataagctaaa

SEQ ID NO: 278663 - DNA, 25 bp, Probe sequence
atatttatatgacgaaaccccgcta

SEQ ID NO: 278664 - DNA, 25 bp, Probe sequence
aaataacatattaagttggtgtatt

SEQ ID NO: 278665 - DNA, 25 bp, Probe sequence
aataacatattaagttggtgtatta

SEQ ID NO: 278666 - DNA, 25 bp, Probe sequence
cccgctaaccattaataaatggaag

SEQ ID NO: 278667 - DNA, 25 bp, Probe sequence
gtaaataacatattaagttggtgta

SEQ ID NO: 278668 - DNA, 25 bp, Probe sequence
tatttatatgacgaaaccccgctaa

SEQ ID NO: 278669 - DNA, 25 bp, Probe sequence
taaatggaagtggggttcatttttg

SEQ ID NO: 278670 - DNA, 25 bp, Probe sequence
taaataacatattaagttggtgtat

SEQ ID NO: 278671 - DNA, 25 bp, Probe sequence
tatatttatatgacgaaaccccgct

SEQ ID NO: 278672 - DNA, 25 bp, Probe sequence
atagtatatatgtaaatgtttaata

SEQ ID NO: 278673 - DNA, 25 bp, Probe sequence
atctggagaaataggaggacattgc

SEQ ID NO: 278674 - DNA, 25 bp, Probe sequence
aaatctggagaaataggaggacatt

SEQ ID NO: 278675 - DNA, 25 bp, Probe sequence
aaaatctggagaaataggaggacat

SEQ ID NO: 278676 - DNA, 25 bp, Probe sequence
aatctggagaaataggaggacattg

SEQ ID NO: 278677 - DNA, 25 bp, Probe sequence
aatgtttaataaaatctggagaaat

SEQ ID NO: 278678 - DNA, 25 bp, Probe sequence
gatagtatatatgtaaatgtttaat

SEQ ID NO: 278679 - DNA, 25 bp, Probe sequence
tctggagaaataggaggacattgcc

SEQ ID NO: 278680 - DNA, 25 bp, Probe sequence
attatgttgctaattcatgttaaaa

SEQ ID NO: 278681 - DNA, 25 bp, Probe sequence
atgttgctaattcatgttaaaatta

SEQ ID NO: 278682 - DNA, 25 bp, Probe sequence
aggattatgttgctaattcatgtta

SEQ ID NO: 278683 - DNA, 25 bp, Probe sequence
gattatgttgctaattcatgttaaa

SEQ ID NO: 278684 - DNA, 25 bp, Probe sequence
gttgctaattcatgttaaaattaaa

SEQ ID NO: 278685 - DNA, 25 bp, Probe sequence
ggattatgttgctaattcatgttaa

SEQ ID NO: 278686 - DNA, 25 bp, Probe sequence
tgttgctaattcatgttaaaattaa

SEQ ID NO: 278687 - DNA, 25 bp, Probe sequence
taggattatgttgctaattcatgtt

SEQ ID NO: 278688 - DNA, 25 bp, Probe sequence
tatgttgctaattcatgttaaaatt

SEQ ID NO: 278689 - DNA, 25 bp, Probe sequence
ttaggattatgttgctaattcatgt

SEQ ID NO: 278690 - DNA, 25 bp, Probe sequence
ttatgttgctaattcatgttaaaat

SEQ ID NO: 278691 - DNA, 25 bp, Probe sequence
atatcattttaaaggaggccattat

SEQ ID NO: 278692 - DNA, 25 bp, Probe sequence
aaatatcattttaaaggaggccatt

SEQ ID NO: 278693 - DNA, 25 bp, Probe sequence
aatatcattttaaaggaggccatta

SEQ ID NO: 278694 - DNA, 25 bp, Probe sequence
tatcattttaaaggaggccattata

SEQ ID NO: 278695 - DNA, 25 bp, Probe sequence
atgtctcctttatttcgcaaaaatt

SEQ ID NO: 278696 - DNA, 25 bp, Probe sequence
acatgtctcctttatttcgcaaaaa

SEQ ID NO: 278697 - DNA, 25 bp, Probe sequence
aacatgtctcctttatttcgcaaaa

SEQ ID NO: 278698 - DNA, 25 bp, Probe sequence
catgtctcctttatttcgcaaaaat

SEQ ID NO: 278699 - DNA, 25 bp, Probe sequence
tgtctcctttatttcgcaaaaattt

SEQ ID NO: 278700 - DNA, 25 bp, Probe sequence
tctcctttatttcgcaaaaatttat

SEQ ID NO: 278701 - DNA, 25 bp, Probe sequence
taacatgtctcctttatttcgcaaa

SEQ ID NO: 278702 - DNA, 25 bp, Probe sequence
ttaaaaactctaaatgacttatcat

SEQ ID NO: 278703 - DNA, 25 bp, Probe sequence
ttaacatgtctcctttatttcgcaa

SEQ ID NO: 278704 - DNA, 25 bp, Probe sequence
gagatattaaagggatattttactt

SEQ ID NO: 278705 - DNA, 25 bp, Probe sequence
ggagatattaaagggatattttact

SEQ ID NO: 278706 - DNA, 25 bp, Probe sequence
taacaaggtttataatttgtagtag

SEQ ID NO: 278707 - DNA, 25 bp, Probe sequence
tataatttgtagtagttaaagtatt

SEQ ID NO: 278708 - DNA, 25 bp, Probe sequence
ataaaagttatatggtatgatgaca

SEQ ID NO: 278709 - DNA, 25 bp, Probe sequence
gataaaagttatatggtatgatgac

SEQ ID NO: 278710 - DNA, 25 bp, Probe sequence
taaaagttatatggtatgatgacat

SEQ ID NO: 278711 - DNA, 25 bp, Probe sequence
attgtcttacttatttatttgttat

SEQ ID NO: 278712 - DNA, 25 bp, Probe sequence
cttatttatttgttatttgataacg

SEQ ID NO: 278713 - DNA, 25 bp, Probe sequence
gataaagatgaggagttgagaatga

SEQ ID NO: 278714 - DNA, 25 bp, Probe sequence
gtcttacttatttatttgttatttg

SEQ ID NO: 278715 - DNA, 25 bp, Probe sequence
tgtcttacttatttatttgttattt

SEQ ID NO: 278716 - DNA, 25 bp, Probe sequence
tcttacttatttatttgttatttga

SEQ ID NO: 278717 - DNA, 25 bp, Probe sequence
tatttatttgttatttgataacgaa

SEQ ID NO: 278718 - DNA, 25 bp, Probe sequence
ttatttatttgttatttgataacga

SEQ ID NO: 278719 - DNA, 25 bp, Probe sequence
ttgtcttacttatttatttgttatt

SEQ ID NO: 278720 - DNA, 25 bp, Probe sequence
gttactgaagattttttctgtttct

SEQ ID NO: 278721 - DNA, 25 bp, Probe sequence
taacgttgttttagttactgaagat

SEQ ID NO: 278722 - DNA, 25 bp, Probe sequence
tataaaaatcttcagtaacgttgtt

SEQ ID NO: 278723 - DNA, 25 bp, Probe sequence
tagttactgaagattttttctgttt

SEQ ID NO: 278724 - DNA, 25 bp, Probe sequence
tttagttactgaagattttttctgt

SEQ ID NO: 278725 - DNA, 25 bp, Probe sequence
ttttagttactgaagattttttctg

SEQ ID NO: 278726 - DNA, 25 bp, Probe sequence
ttataaaaatcttcagtaacgttgt

SEQ ID NO: 278727 - DNA, 25 bp, Probe sequence
ttagttactgaagattttttctgtt

SEQ ID NO: 278728 - DNA, 25 bp, Probe sequence
atgtgaagcggacaatcttaattta

SEQ ID NO: 278729 - DNA, 25 bp, Probe sequence
gcggacaatcttaatttagtttaag

SEQ ID NO: 278730 - DNA, 25 bp, Probe sequence
gaagcggacaatcttaatttagttt

SEQ ID NO: 278731 - DNA, 25 bp, Probe sequence
gatgtgaagcggacaatcttaattt

SEQ ID NO: 278732 - DNA, 25 bp, Probe sequence
gtgaagcggacaatcttaatttagt

SEQ ID NO: 278733 - DNA, 25 bp, Probe sequence
tgtgaagcggacaatcttaatttag

SEQ ID NO: 278734 - DNA, 25 bp, Probe sequence
tgatgtgaagcggacaatcttaatt

SEQ ID NO: 278735 - DNA, 25 bp, Probe sequence
tgaagcggacaatcttaatttagtt

SEQ ID NO: 278736 - DNA, 25 bp, Probe sequence
ttgatgtgaagcggacaatcttaat

SEQ ID NO: 278737 - DNA, 25 bp, Probe sequence
gtttataatctaaggaggatatatc

SEQ ID NO: 278738 - DNA, 25 bp, Probe sequence
tcgtttataatctaaggaggatata

SEQ ID NO: 278739 - DNA, 25 bp, Probe sequence
tagtatttttcgtttataatctaag

SEQ ID NO: 278740 - DNA, 25 bp, Probe sequence
tatttttcgtttataatctaaggag

SEQ ID NO: 278741 - DNA, 25 bp, Probe sequence
tttcgtttataatctaaggaggata

SEQ ID NO: 278742 - DNA, 25 bp, Probe sequence
ttttcgtttataatctaaggaggat

SEQ ID NO: 278743 - DNA, 25 bp, Probe sequence
ttcgtttataatctaaggaggatat

SEQ ID NO: 278744 - DNA, 25 bp, Probe sequence
atagattgaaaatttaggggagtga

SEQ ID NO: 278745 - DNA, 25 bp, Probe sequence
gattgaaaatttaggggagtgaaat

SEQ ID NO: 278746 - DNA, 25 bp, Probe sequence
tagattgaaaatttaggggagtgaa

SEQ ID NO: 278747 - DNA, 25 bp, Probe sequence
atgcagaatagagaggagatttaat

SEQ ID NO: 278748 - DNA, 25 bp, Probe sequence
agaatagagaggagatttaatgcga

SEQ ID NO: 278749 - DNA, 25 bp, Probe sequence
acgctttatattgtaaaatagtatt

SEQ ID NO: 278750 - DNA, 25 bp, Probe sequence
aatgcagaatagagaggagatttaa

SEQ ID NO: 278751 - DNA, 25 bp, Probe sequence
cagaatagagaggagatttaatgcg

SEQ ID NO: 278752 - DNA, 25 bp, Probe sequence
gcagaatagagaggagatttaatgc

SEQ ID NO: 278753 - DNA, 25 bp, Probe sequence
gaatagagaggagatttaatgcgat

SEQ ID NO: 278754 - DNA, 25 bp, Probe sequence
agcctattcgtttgaattatttaat

SEQ ID NO: 278755 - DNA, 25 bp, Probe sequence
cagcctattcgtttgaattatttaa

SEQ ID NO: 278756 - DNA, 25 bp, Probe sequence
cccagcctattcgtttgaattattt

SEQ ID NO: 278757 - DNA, 25 bp, Probe sequence
ccagcctattcgtttgaattattta

SEQ ID NO: 278758 - DNA, 25 bp, Probe sequence
gcctattcgtttgaattatttaatt

SEQ ID NO: 278759 - DNA, 25 bp, Probe sequence
gtcccagcctattcgtttgaattat

SEQ ID NO: 278760 - DNA, 25 bp, Probe sequence
tgtcccagcctattcgtttgaatta

SEQ ID NO: 278761 - DNA, 25 bp, Probe sequence
tcccagcctattcgtttgaattatt

SEQ ID NO: 278762 - DNA, 25 bp, Probe sequence
atgattgttaaaatattctaaaaat

SEQ ID NO: 278763 - DNA, 25 bp, Probe sequence
gaaattattataaaatggagtgaca

SEQ ID NO: 278764 - DNA, 25 bp, Probe sequence
gattgttaaaatattctaaaaattg

SEQ ID NO: 278765 - DNA, 25 bp, Probe sequence
gtaaaatgattgttaaaatattcta

SEQ ID NO: 278766 - DNA, 25 bp, Probe sequence
taaaatgattgttaaaatattctaa

SEQ ID NO: 278767 - DNA, 25 bp, Probe sequence
ttattataaaatggagtgacaagtt

SEQ ID NO: 278768 - DNA, 25 bp, Probe sequence
cataaaatttgtatcaatttagttt

SEQ ID NO: 278769 - DNA, 25 bp, Probe sequence
cttttcttcaattcattttatcata

SEQ ID NO: 278770 - DNA, 25 bp, Probe sequence
ctccttttcttcaattcattttatc

SEQ ID NO: 278771 - DNA, 25 bp, Probe sequence
cctccttttcttcaattcattttat

SEQ ID NO: 278772 - DNA, 25 bp, Probe sequence
ccttttcttcaattcattttatcat

SEQ ID NO: 278773 - DNA, 25 bp, Probe sequence
tccttttcttcaattcattttatca

SEQ ID NO: 278774 - DNA, 25 bp, Probe sequence
tcttcaattcattttatcataaaat

SEQ ID NO: 278775 - DNA, 25 bp, Probe sequence
tttcttcaattcattttatcataaa

SEQ ID NO: 278776 - DNA, 25 bp, Probe sequence
ttttatcataaaatttgtatcaatt

SEQ ID NO: 278777 - DNA, 25 bp, Probe sequence
ttttcttcaattcattttatcataa

SEQ ID NO: 278778 - DNA, 25 bp, Probe sequence
ttcttcaattcattttatcataaaa

SEQ ID NO: 278779 - DNA, 25 bp, Probe sequence
tctttatttaattactgaattaggt

SEQ ID NO: 278780 - DNA, 25 bp, Probe sequence
tttctttatttaattactgaattag

SEQ ID NO: 278781 - DNA, 25 bp, Probe sequence
tttaattactgaattaggtatgaca

SEQ ID NO: 278782 - DNA, 25 bp, Probe sequence
ttctttatttaattactgaattagg

SEQ ID NO: 278783 - DNA, 25 bp, Probe sequence
agagataatagttgttattacccga

SEQ ID NO: 278784 - DNA, 25 bp, Probe sequence
gattatatataactatttagagata

SEQ ID NO: 278785 - DNA, 25 bp, Probe sequence
tgattatatataactatttagagat

SEQ ID NO: 278786 - DNA, 25 bp, Probe sequence
tagagataatagttgttattacccg

SEQ ID NO: 278787 - DNA, 25 bp, Probe sequence
tttatgtctccttaattaatgatta

SEQ ID NO: 278788 - DNA, 25 bp, Probe sequence
ttttatgtctccttaattaatgatt

SEQ ID NO: 278789 - DNA, 25 bp, Probe sequence
ttatgtctccttaattaatgattat

SEQ ID NO: 278790 - DNA, 25 bp, Probe sequence
attttcagggtagctcagctaccct

SEQ ID NO: 278791 - DNA, 25 bp, Probe sequence
atacatagcaatataaggagattaa

SEQ ID NO: 278792 - DNA, 25 bp, Probe sequence
agggtagctcagctacccttctttt

SEQ ID NO: 278793 - DNA, 25 bp, Probe sequence
cagggtagctcagctacccttcttt

SEQ ID NO: 278794 - DNA, 25 bp, Probe sequence
gggtagctcagctacccttcttttt

SEQ ID NO: 278795 - DNA, 25 bp, Probe sequence
tttcagggtagctcagctacccttc

SEQ ID NO: 278796 - DNA, 25 bp, Probe sequence
tcagggtagctcagctacccttctt

SEQ ID NO: 278797 - DNA, 25 bp, Probe sequence
tacatagcaatataaggagattaaa

SEQ ID NO: 278798 - DNA, 25 bp, Probe sequence
ttttcagggtagctcagctaccctt

SEQ ID NO: 278799 - DNA, 25 bp, Probe sequence
ttcagggtagctcagctacccttct

SEQ ID NO: 278800 - DNA, 25 bp, Probe sequence
agaagcgatatttcacttctgtttg

SEQ ID NO: 278801 - DNA, 25 bp, Probe sequence
agcgatatttcacttctgtttgtat

SEQ ID NO: 278802 - DNA, 25 bp, Probe sequence
acagaagcgatatttcacttctgtt

SEQ ID NO: 278803 - DNA, 25 bp, Probe sequence
aaacagaagcgatatttcacttctg

SEQ ID NO: 278804 - DNA, 25 bp, Probe sequence
aaaaaacagaagcgatatttcactt

SEQ ID NO: 278805 - DNA, 25 bp, Probe sequence
aaaaacagaagcgatatttcacttc

SEQ ID NO: 278806 - DNA, 25 bp, Probe sequence
aaaacagaagcgatatttcacttct

SEQ ID NO: 278807 - DNA, 25 bp, Probe sequence
aacagaagcgatatttcacttctgt

SEQ ID NO: 278808 - DNA, 25 bp, Probe sequence
aagcgatatttcacttctgtttgta

SEQ ID NO: 278809 - DNA, 25 bp, Probe sequence
cagaagcgatatttcacttctgttt

SEQ ID NO: 278810 - DNA, 25 bp, Probe sequence
gaagcgatatttcacttctgtttgt

SEQ ID NO: 278811 - DNA, 25 bp, Probe sequence
atacaatttacaagggagatatttg

SEQ ID NO: 278812 - DNA, 25 bp, Probe sequence
agaatacaatttacaagggagatat

SEQ ID NO: 278813 - DNA, 25 bp, Probe sequence
acaatttacaagggagatatttgac

SEQ ID NO: 278814 - DNA, 25 bp, Probe sequence
aagaatacaatttacaagggagata

SEQ ID NO: 278815 - DNA, 25 bp, Probe sequence
aatacaatttacaagggagatattt

SEQ ID NO: 278816 - DNA, 25 bp, Probe sequence
caatttacaagggagatatttgaca

SEQ ID NO: 278817 - DNA, 25 bp, Probe sequence
gaatacaatttacaagggagatatt

SEQ ID NO: 278818 - DNA, 25 bp, Probe sequence
tacaatttacaagggagatatttga

SEQ ID NO: 278819 - DNA, 25 bp, Probe sequence
ataggtcactcatcccaataaaatt

SEQ ID NO: 278820 - DNA, 25 bp, Probe sequence
aggtcactcatcccaataaaattat

SEQ ID NO: 278821 - DNA, 25 bp, Probe sequence
gtcactcatcccaataaaattattt

SEQ ID NO: 278822 - DNA, 25 bp, Probe sequence
ggtcactcatcccaataaaattatt

SEQ ID NO: 278823 - DNA, 25 bp, Probe sequence
taggtcactcatcccaataaaatta

SEQ ID NO: 278824 - DNA, 25 bp, Probe sequence
atttacaataagacaaactttgagg

SEQ ID NO: 278825 - DNA, 25 bp, Probe sequence
acaataagacaaactttgaggttgg

SEQ ID NO: 278826 - DNA, 25 bp, Probe sequence
caataagacaaactttgaggttggg

SEQ ID NO: 278827 - DNA, 25 bp, Probe sequence
tacaataagacaaactttgaggttg

SEQ ID NO: 278828 - DNA, 25 bp, Probe sequence
tttacaataagacaaactttgaggt

SEQ ID NO: 278829 - DNA, 25 bp, Probe sequence
ttacaataagacaaactttgaggtt

SEQ ID NO: 278830 - DNA, 25 bp, Probe sequence
attcttatctccttttatccaaaat

SEQ ID NO: 278831 - DNA, 25 bp, Probe sequence
aaagacgactaataagccgtctatt

SEQ ID NO: 278832 - DNA, 25 bp, Probe sequence
aaaagacgactaataagccgtctat

SEQ ID NO: 278833 - DNA, 25 bp, Probe sequence
tcttatctccttttatccaaaataa

SEQ ID NO: 278834 - DNA, 25 bp, Probe sequence
tatccaaaataaaaagacgactaat

SEQ ID NO: 278835 - DNA, 25 bp, Probe sequence
ttcttatctccttttatccaaaata

SEQ ID NO: 278836 - DNA, 25 bp, Probe sequence
ataatactctccttattttcaaata

SEQ ID NO: 278837 - DNA, 25 bp, Probe sequence
taatactctccttattttcaaataa

SEQ ID NO: 278838 - DNA, 25 bp, Probe sequence
tataatactctccttattttcaaat

SEQ ID NO: 278839 - DNA, 25 bp, Probe sequence
tttataatactctccttattttcaa

SEQ ID NO: 278840 - DNA, 25 bp, Probe sequence
ttataatactctccttattttcaaa

SEQ ID NO: 278841 - DNA, 25 bp, Probe sequence
attattttttgccaattttgaggag

SEQ ID NO: 278842 - DNA, 25 bp, Probe sequence
cttattattttttgccaattttgag

SEQ ID NO: 278843 - DNA, 25 bp, Probe sequence
gcgaaatttcgggtagctcgcctac

SEQ ID NO: 278844 - DNA, 25 bp, Probe sequence
tgcgaaatttcgggtagctcgccta

SEQ ID NO: 278845 - DNA, 25 bp, Probe sequence
tattttttgccaattttgaggaggg

SEQ ID NO: 278846 - DNA, 25 bp, Probe sequence
tattattttttgccaattttgagga

SEQ ID NO: 278847 - DNA, 25 bp, Probe sequence
tttgccaattttgaggagggaacac

SEQ ID NO: 278848 - DNA, 25 bp, Probe sequence
ttttgccaattttgaggagggaaca

SEQ ID NO: 278849 - DNA, 25 bp, Probe sequence
ttattttttgccaattttgaggagg

SEQ ID NO: 278850 - DNA, 25 bp, Probe sequence
ttattattttttgccaattttgagg

SEQ ID NO: 278851 - DNA, 25 bp, Probe sequence
agtcataaattgatttctaattgaa

SEQ ID NO: 278852 - DNA, 25 bp, Probe sequence
acagtcataaattgatttctaattg

SEQ ID NO: 278853 - DNA, 25 bp, Probe sequence
aaacagtcataaattgatttctaat

SEQ ID NO: 278854 - DNA, 25 bp, Probe sequence
aaaaacagtcataaattgatttcta

SEQ ID NO: 278855 - DNA, 25 bp, Probe sequence
aaaacagtcataaattgatttctaa

SEQ ID NO: 278856 - DNA, 25 bp, Probe sequence
aacagtcataaattgatttctaatt

SEQ ID NO: 278857 - DNA, 25 bp, Probe sequence
cacatagtaagaaaaacagtcataa

SEQ ID NO: 278858 - DNA, 25 bp, Probe sequence
cagtcataaattgatttctaattga

SEQ ID NO: 278859 - DNA, 25 bp, Probe sequence
gtcataaattgatttctaattgaaa

SEQ ID NO: 278860 - DNA, 25 bp, Probe sequence
acaacttgtttatgagagaaatatt

SEQ ID NO: 278861 - DNA, 25 bp, Probe sequence
aacaacttgtttatgagagaaatat

SEQ ID NO: 278862 - DNA, 25 bp, Probe sequence
aacttgtttatgagagaaatattaa

SEQ ID NO: 278863 - DNA, 25 bp, Probe sequence
caacttgtttatgagagaaatatta

SEQ ID NO: 278864 - DNA, 25 bp, Probe sequence
caaacttagttattaagaaatcatt

SEQ ID NO: 278865 - DNA, 25 bp, Probe sequence
cgtaacaacttgtttatgagagaaa

SEQ ID NO: 278866 - DNA, 25 bp, Probe sequence
gagagaaatattaattttcaaactt

SEQ ID NO: 278867 - DNA, 25 bp, Probe sequence
gagaaatattaattttcaaacttag

SEQ ID NO: 278868 - DNA, 25 bp, Probe sequence
gtaacaacttgtttatgagagaaat

SEQ ID NO: 278869 - DNA, 25 bp, Probe sequence
taacaacttgtttatgagagaaata

SEQ ID NO: 278870 - DNA, 25 bp, Probe sequence
atactattatttaaggatagacatt

SEQ ID NO: 278871 - DNA, 25 bp, Probe sequence
actatactattatttaaggatagac

SEQ ID NO: 278872 - DNA, 25 bp, Probe sequence
acattaataatgaggtgggaatctt

SEQ ID NO: 278873 - DNA, 25 bp, Probe sequence
ctatactattatttaaggatagaca

SEQ ID NO: 278874 - DNA, 25 bp, Probe sequence
gacattaataatgaggtgggaatct

SEQ ID NO: 278875 - DNA, 25 bp, Probe sequence
tactatactattatttaaggataga

SEQ ID NO: 278876 - DNA, 25 bp, Probe sequence
tatactattatttaaggatagacat

SEQ ID NO: 278877 - DNA, 25 bp, Probe sequence
tttactatactattatttaaggata

SEQ ID NO: 278878 - DNA, 25 bp, Probe sequence
ttactatactattatttaaggatag

SEQ ID NO: 278879 - DNA, 25 bp, Probe sequence
attttcccatctattaggtaagtca

SEQ ID NO: 278880 - DNA, 25 bp, Probe sequence
atattttcccatctattaggtaagt

SEQ ID NO: 278881 - DNA, 25 bp, Probe sequence
acctaatattttcccatctattagg

SEQ ID NO: 278882 - DNA, 25 bp, Probe sequence
aacctaatattttcccatctattag

SEQ ID NO: 278883 - DNA, 25 bp, Probe sequence
aatattttcccatctattaggtaag

SEQ ID NO: 278884 - DNA, 25 bp, Probe sequence
ctaatattttcccatctattaggta

SEQ ID NO: 278885 - DNA, 25 bp, Probe sequence
cctaatattttcccatctattaggt

SEQ ID NO: 278886 - DNA, 25 bp, Probe sequence
gaacctaatattttcccatctatta

SEQ ID NO: 278887 - DNA, 25 bp, Probe sequence
taatattttcccatctattaggtaa

SEQ ID NO: 278888 - DNA, 25 bp, Probe sequence
tattttcccatctattaggtaagtc

SEQ ID NO: 278889 - DNA, 25 bp, Probe sequence
atatgaagaacctaattatttcttg

SEQ ID NO: 278890 - DNA, 25 bp, Probe sequence
atgaagaacctaattatttcttggg

SEQ ID NO: 278891 - DNA, 25 bp, Probe sequence
ctaattatttcttgggaaatttgat

SEQ ID NO: 278892 - DNA, 25 bp, Probe sequence
tgaagaacctaattatttcttggga

SEQ ID NO: 278893 - DNA, 25 bp, Probe sequence
taattatttcttgggaaatttgatt

SEQ ID NO: 278894 - DNA, 25 bp, Probe sequence
tatgaagaacctaattatttcttgg

SEQ ID NO: 278895 - DNA, 25 bp, Probe sequence
tatttcttgggaaatttgatttaat

SEQ ID NO: 278896 - DNA, 25 bp, Probe sequence
attctcaagtattttgaaattgatt

SEQ ID NO: 278897 - DNA, 25 bp, Probe sequence
ctcaagtattttgaaattgattggt

SEQ ID NO: 278898 - DNA, 25 bp, Probe sequence
tttaaaatttatatgggtcgcaact

SEQ ID NO: 278899 - DNA, 25 bp, Probe sequence
tctcaagtattttgaaattgattgg

SEQ ID NO: 278900 - DNA, 25 bp, Probe sequence
tcaagtattttgaaattgattggtt

SEQ ID NO: 278901 - DNA, 25 bp, Probe sequence
tattctcaagtattttgaaattgat

SEQ ID NO: 278902 - DNA, 25 bp, Probe sequence
ttattctcaagtattttgaaattga

SEQ ID NO: 278903 - DNA, 25 bp, Probe sequence
ttaaaatttatatgggtcgcaactg

SEQ ID NO: 278904 - DNA, 25 bp, Probe sequence
ttctcaagtattttgaaattgattg

SEQ ID NO: 278905 - DNA, 25 bp, Probe sequence
attttacaaacttatgttagcatag

SEQ ID NO: 278906 - DNA, 25 bp, Probe sequence
aattttacaaacttatgttagcata

SEQ ID NO: 278907 - DNA, 25 bp, Probe sequence
cgaattttacaaacttatgttagca

SEQ ID NO: 278908 - DNA, 25 bp, Probe sequence
gaattttacaaacttatgttagcat

SEQ ID NO: 278909 - DNA, 25 bp, Probe sequence
tttacaaacttatgttagcatagaa

SEQ ID NO: 278910 - DNA, 25 bp, Probe sequence
ttttacaaacttatgttagcataga

SEQ ID NO: 278911 - DNA, 25 bp, Probe sequence
ttacaaacttatgttagcatagaaa

SEQ ID NO: 278912 - DNA, 25 bp, Probe sequence
atgtattagtatttattttaacgtg

SEQ ID NO: 278913 - DNA, 25 bp, Probe sequence
acgtgaacaaaatgatgtacggagg

SEQ ID NO: 278914 - DNA, 25 bp, Probe sequence
aacgtgaacaaaatgatgtacggag

SEQ ID NO: 278915 - DNA, 25 bp, Probe sequence
cgtgaacaaaatgatgtacggaggt

SEQ ID NO: 278916 - DNA, 25 bp, Probe sequence
gaacaaaatgatgtacggaggtgca

SEQ ID NO: 278917 - DNA, 25 bp, Probe sequence
tgtattagtatttattttaacgtga

SEQ ID NO: 278918 - DNA, 25 bp, Probe sequence
gtgaacaaaatgatgtacggaggtg

SEQ ID NO: 278919 - DNA, 25 bp, Probe sequence
tgaacaaaatgatgtacggaggtgc

SEQ ID NO: 278920 - DNA, 25 bp, Probe sequence
taatgtattagtatttattttaacg

SEQ ID NO: 278921 - DNA, 25 bp, Probe sequence
taacgtgaacaaaatgatgtacgga

SEQ ID NO: 278922 - DNA, 25 bp, Probe sequence
tagaaaaggttttataatgtattag

SEQ ID NO: 278923 - DNA, 25 bp, Probe sequence
cttagacggttagacggtccgctat

SEQ ID NO: 278924 - DNA, 25 bp, Probe sequence
atttcaatgattaagcgttaaagtt

SEQ ID NO: 278925 - DNA, 25 bp, Probe sequence
aatttcaatgattaagcgttaaagt

SEQ ID NO: 278926 - DNA, 25 bp, Probe sequence
gtcttaatttcaatgattaagcgtt

SEQ ID NO: 278927 - DNA, 25 bp, Probe sequence
tagacggttagacggtccgctatta

SEQ ID NO: 278928 - DNA, 25 bp, Probe sequence
tcaatgattaagcgttaaagttaaa

SEQ ID NO: 278929 - DNA, 25 bp, Probe sequence
taatttcaatgattaagcgttaaag

SEQ ID NO: 278930 - DNA, 25 bp, Probe sequence
ttagacggttagacggtccgctatt

SEQ ID NO: 278931 - DNA, 25 bp, Probe sequence
tttcaatgattaagcgttaaagtta

SEQ ID NO: 278932 - DNA, 25 bp, Probe sequence
ttcaatgattaagcgttaaagttaa

SEQ ID NO: 278933 - DNA, 25 bp, Probe sequence
ttaatttcaatgattaagcgttaaa

SEQ ID NO: 278934 - DNA, 25 bp, Probe sequence
agctcgtcgggctcataacccgaag

SEQ ID NO: 278935 - DNA, 25 bp, Probe sequence
ctcgtcgggctcataacccgaaggt

SEQ ID NO: 278936 - DNA, 25 bp, Probe sequence
gctcgtcgggctcataacccgaagg

SEQ ID NO: 278937 - DNA, 25 bp, Probe sequence
atggagcagttcggtagctcgtcgg

SEQ ID NO: 278938 - DNA, 25 bp, Probe sequence
cgtcgggctcataacccgaaggtcg

SEQ ID NO: 278939 - DNA, 25 bp, Probe sequence
cgggctcataacccgaaggtcggtg

SEQ ID NO: 278940 - DNA, 25 bp, Probe sequence
cgggatggagcagttcggtagctcg

SEQ ID NO: 278941 - DNA, 25 bp, Probe sequence
cgcgggatggagcagttcggtagct

SEQ ID NO: 278942 - DNA, 25 bp, Probe sequence
tcgtcgggctcataacccgaaggtc

SEQ ID NO: 278943 - DNA, 25 bp, Probe sequence
gcgggatggagcagttcggtagctc

SEQ ID NO: 278944 - DNA, 25 bp, Probe sequence
gctcataacccgaaggtcggtggtt

SEQ ID NO: 278945 - DNA, 25 bp, Probe sequence
gggctcataacccgaaggtcggtgg

SEQ ID NO: 278946 - DNA, 25 bp, Probe sequence
gaaggtcggtggttcaaatccgcct

SEQ ID NO: 278947 - DNA, 25 bp, Probe sequence
gatggagcagttcggtagctcgtcg

SEQ ID NO: 278948 - DNA, 25 bp, Probe sequence
gtcgggctcataacccgaaggtcgg

SEQ ID NO: 278949 - DNA, 25 bp, Probe sequence
gggatggagcagttcggtagctcgt

SEQ ID NO: 278950 - DNA, 25 bp, Probe sequence
ggatggagcagttcggtagctcgtc

SEQ ID NO: 278951 - DNA, 25 bp, Probe sequence
tggagcagttcggtagctcgtcggg

SEQ ID NO: 278952 - DNA, 25 bp, Probe sequence
ggctcataacccgaaggtcggtggt

SEQ ID NO: 278953 - DNA, 25 bp, Probe sequence
tcgggctcataacccgaaggtcggt

SEQ ID NO: 278954 - DNA, 25 bp, Probe sequence
tcataacccgaaggtcggtggttca

SEQ ID NO: 278955 - DNA, 25 bp, Probe sequence
tagctcgtcgggctcataacccgaa

SEQ ID NO: 278956 - DNA, 25 bp, Probe sequence
aaatcccgttccacttgtggagtgt

SEQ ID NO: 278957 - DNA, 25 bp, Probe sequence
cttgtggagtgtcggttcgaccccg

SEQ ID NO: 278958 - DNA, 25 bp, Probe sequence
atcccgttccacttgtggagtgtcg

SEQ ID NO: 278959 - DNA, 25 bp, Probe sequence
agacgcgcgggactcaaaatcccgt

SEQ ID NO: 278960 - DNA, 25 bp, Probe sequence
cagacgcgcgggactcaaaatcccg

SEQ ID NO: 278961 - DNA, 25 bp, Probe sequence
aaaatcccgttccacttgtggagtg

SEQ ID NO: 278962 - DNA, 25 bp, Probe sequence
caaaatcccgttccacttgtggagt

SEQ ID NO: 278963 - DNA, 25 bp, Probe sequence
aatcccgttccacttgtggagtgtc

SEQ ID NO: 278964 - DNA, 25 bp, Probe sequence
cacttgtggagtgtcggttcgaccc

SEQ ID NO: 278965 - DNA, 25 bp, Probe sequence
ctcaaaatcccgttccacttgtgga

SEQ ID NO: 278966 - DNA, 25 bp, Probe sequence
cgttccacttgtggagtgtcggttc

SEQ ID NO: 278967 - DNA, 25 bp, Probe sequence
ccgttccacttgtggagtgtcggtt

SEQ ID NO: 278968 - DNA, 25 bp, Probe sequence
cccgttccacttgtggagtgtcggt

SEQ ID NO: 278969 - DNA, 25 bp, Probe sequence
gcgggactcaaaatcccgttccact

SEQ ID NO: 278970 - DNA, 25 bp, Probe sequence
ccacttgtggagtgtcggttcgacc

SEQ ID NO: 278971 - DNA, 25 bp, Probe sequence
gcgcgggactcaaaatcccgttcca

SEQ ID NO: 278972 - DNA, 25 bp, Probe sequence
gacgcgcgggactcaaaatcccgtt

SEQ ID NO: 278973 - DNA, 25 bp, Probe sequence
gcagacgcgcgggactcaaaatccc

SEQ ID NO: 278974 - DNA, 25 bp, Probe sequence
gttccacttgtggagtgtcggttcg

SEQ ID NO: 278975 - DNA, 25 bp, Probe sequence
tgtggagtgtcggttcgaccccgac

SEQ ID NO: 278976 - DNA, 25 bp, Probe sequence
tcccgttccacttgtggagtgtcgg

SEQ ID NO: 278977 - DNA, 25 bp, Probe sequence
tccacttgtggagtgtcggttcgac

SEQ ID NO: 278978 - DNA, 25 bp, Probe sequence
tcaaaatcccgttccacttgtggag

SEQ ID NO: 278979 - DNA, 25 bp, Probe sequence
ttccacttgtggagtgtcggttcga

SEQ ID NO: 278980 - DNA, 25 bp, Probe sequence
tccttcccggaacgaggtataggtg

SEQ ID NO: 278981 - DNA, 25 bp, Probe sequence
gagtagttcaacttttagaacacgt

SEQ ID NO: 278982 - DNA, 25 bp, Probe sequence
ggagtagttcaacttttagaacacg

SEQ ID NO: 278983 - DNA, 25 bp, Probe sequence
agaggtctccaaaacctttggtgtg

SEQ ID NO: 278984 - DNA, 25 bp, Probe sequence
agttcaacggtagaatagaggtctc

SEQ ID NO: 278985 - DNA, 25 bp, Probe sequence
atagttcaacggtagaatagaggtc

SEQ ID NO: 278986 - DNA, 25 bp, Probe sequence
atagaggtctccaaaacctttggtg

SEQ ID NO: 278987 - DNA, 25 bp, Probe sequence
aggggcatagttcaacggtagaata

SEQ ID NO: 278988 - DNA, 25 bp, Probe sequence
agaatagaggtctccaaaacctttg

SEQ ID NO: 278989 - DNA, 25 bp, Probe sequence
caacggtagaatagaggtctccaaa

SEQ ID NO: 278990 - DNA, 25 bp, Probe sequence
catagttcaacggtagaatagaggt

SEQ ID NO: 278991 - DNA, 25 bp, Probe sequence
ctttggtgtgggttcgattcctact

SEQ ID NO: 278992 - DNA, 25 bp, Probe sequence
gcatagttcaacggtagaatagagg

SEQ ID NO: 278993 - DNA, 25 bp, Probe sequence
gaatagaggtctccaaaacctttgg

SEQ ID NO: 278994 - DNA, 25 bp, Probe sequence
gaggtctccaaaacctttggtgtgg

SEQ ID NO: 278995 - DNA, 25 bp, Probe sequence
gttcaacggtagaatagaggtctcc

SEQ ID NO: 278996 - DNA, 25 bp, Probe sequence
gtagaatagaggtctccaaaacctt

SEQ ID NO: 278997 - DNA, 25 bp, Probe sequence
gggcatagttcaacggtagaataga

SEQ ID NO: 278998 - DNA, 25 bp, Probe sequence
ggggcatagttcaacggtagaatag

SEQ ID NO: 278999 - DNA, 25 bp, Probe sequence
ggtagaatagaggtctccaaaacct

SEQ ID NO: 279000 - DNA, 25 bp, Probe sequence
ggcatagttcaacggtagaatagag

SEQ ID NO: 279001 - DNA, 25 bp, Probe sequence
tcaacggtagaatagaggtctccaa

SEQ ID NO: 279002 - DNA, 25 bp, Probe sequence
tagaatagaggtctccaaaaccttt

SEQ ID NO: 279003 - DNA, 25 bp, Probe sequence
tagttcaacggtagaatagaggtct

SEQ ID NO: 279004 - DNA, 25 bp, Probe sequence
tagaggtctccaaaacctttggtgt

SEQ ID NO: 279005 - DNA, 25 bp, Probe sequence
tttggtgtgggttcgattcctactg

SEQ ID NO: 279006 - DNA, 25 bp, Probe sequence
ttcaacggtagaatagaggtctcca

SEQ ID NO: 279007 - DNA, 25 bp, Probe sequence
attctataatcaaatcggattgatg

SEQ ID NO: 279008 - DNA, 25 bp, Probe sequence
atagattctataatcaaatcggatt

SEQ ID NO: 279009 - DNA, 25 bp, Probe sequence
atcggattgatgaaaggttatttac

SEQ ID NO: 279010 - DNA, 25 bp, Probe sequence
atgaaaggttatttacttttcatca

SEQ ID NO: 279011 - DNA, 25 bp, Probe sequence
agattctataatcaaatcggattga

SEQ ID NO: 279012 - DNA, 25 bp, Probe sequence
aaatagattctataatcaaatcgga

SEQ ID NO: 279013 - DNA, 25 bp, Probe sequence
aaatcggattgatgaaaggttattt

SEQ ID NO: 279014 - DNA, 25 bp, Probe sequence
aatcggattgatgaaaggttattta

SEQ ID NO: 279015 - DNA, 25 bp, Probe sequence
aatagattctataatcaaatcggat

SEQ ID NO: 279016 - DNA, 25 bp, Probe sequence
caaatcggattgatgaaaggttatt

SEQ ID NO: 279017 - DNA, 25 bp, Probe sequence
cggattgatgaaaggttatttactt

SEQ ID NO: 279018 - DNA, 25 bp, Probe sequence
gaaaggttatttacttttcatcaat

SEQ ID NO: 279019 - DNA, 25 bp, Probe sequence
gatgaaaggttatttacttttcatc

SEQ ID NO: 279020 - DNA, 25 bp, Probe sequence
gattctataatcaaatcggattgat

SEQ ID NO: 279021 - DNA, 25 bp, Probe sequence
gattgatgaaaggttatttactttt

SEQ ID NO: 279022 - DNA, 25 bp, Probe sequence
ggattgatgaaaggttatttacttt

SEQ ID NO: 279023 - DNA, 25 bp, Probe sequence
tgatgaaaggttatttacttttcat

SEQ ID NO: 279024 - DNA, 25 bp, Probe sequence
tgaaaggttatttacttttcatcaa

SEQ ID NO: 279025 - DNA, 25 bp, Probe sequence
tcggattgatgaaaggttatttact

SEQ ID NO: 279026 - DNA, 25 bp, Probe sequence
tctataatcaaatcggattgatgaa

SEQ ID NO: 279027 - DNA, 25 bp, Probe sequence
tagattctataatcaaatcggattg

SEQ ID NO: 279028 - DNA, 25 bp, Probe sequence
ttgatgaaaggttatttacttttca

SEQ ID NO: 279029 - DNA, 25 bp, Probe sequence
ttctataatcaaatcggattgatga

SEQ ID NO: 279030 - DNA, 25 bp, Probe sequence
atgccagatttaatagaaatgatcg

SEQ ID NO: 279031 - DNA, 25 bp, Probe sequence
agatttaatagaaatgatcgttttt

SEQ ID NO: 279032 - DNA, 25 bp, Probe sequence
cagatttaatagaaatgatcgtttt

SEQ ID NO: 279033 - DNA, 25 bp, Probe sequence
ccagatttaatagaaatgatcgttt

SEQ ID NO: 279034 - DNA, 25 bp, Probe sequence
gccagatttaatagaaatgatcgtt

SEQ ID NO: 279035 - DNA, 25 bp, Probe sequence
gatttaatagaaatgatcgttttta

SEQ ID NO: 279036 - DNA, 25 bp, Probe sequence
tgccagatttaatagaaatgatcgt

SEQ ID NO: 279037 - DNA, 25 bp, Probe sequence
taatagaaatgatcgtttttaaagt

SEQ ID NO: 279038 - DNA, 25 bp, Probe sequence
atgaacttttagtcattcgtagtgc

SEQ ID NO: 279039 - DNA, 25 bp, Probe sequence
atgaatgaacttttagtcattcgta

SEQ ID NO: 279040 - DNA, 25 bp, Probe sequence
agtcattcgtagtgcgtatgcgaag

SEQ ID NO: 279041 - DNA, 25 bp, Probe sequence
acttttagtcattcgtagtgcgtat

SEQ ID NO: 279042 - DNA, 25 bp, Probe sequence
aacttttagtcattcgtagtgcgta

SEQ ID NO: 279043 - DNA, 25 bp, Probe sequence
aatgaacttttagtcattcgtagtg

SEQ ID NO: 279044 - DNA, 25 bp, Probe sequence
cattcgtagtgcgtatgcgaagtag

SEQ ID NO: 279045 - DNA, 25 bp, Probe sequence
cttttagtcattcgtagtgcgtatg

SEQ ID NO: 279046 - DNA, 25 bp, Probe sequence
gaacttttagtcattcgtagtgcgt

SEQ ID NO: 279047 - DNA, 25 bp, Probe sequence
gaatgaacttttagtcattcgtagt

SEQ ID NO: 279048 - DNA, 25 bp, Probe sequence
gtcattcgtagtgcgtatgcgaagt

SEQ ID NO: 279049 - DNA, 25 bp, Probe sequence
tgaacttttagtcattcgtagtgcg

SEQ ID NO: 279050 - DNA, 25 bp, Probe sequence
tgaatgaacttttagtcattcgtag

SEQ ID NO: 279051 - DNA, 25 bp, Probe sequence
tcattcgtagtgcgtatgcgaagta

SEQ ID NO: 279052 - DNA, 25 bp, Probe sequence
tagtcattcgtagtgcgtatgcgaa

SEQ ID NO: 279053 - DNA, 25 bp, Probe sequence
tttagtcattcgtagtgcgtatgcg

SEQ ID NO: 279054 - DNA, 25 bp, Probe sequence
ttttagtcattcgtagtgcgtatgc

SEQ ID NO: 279055 - DNA, 25 bp, Probe sequence
ttagtcattcgtagtgcgtatgcga

SEQ ID NO: 279056 - DNA, 25 bp, Probe sequence
attacaaaattatgtatcactttag

SEQ ID NO: 279057 - DNA, 25 bp, Probe sequence
attatgtatcactttaggtttaatt

SEQ ID NO: 279058 - DNA, 25 bp, Probe sequence
atttattacaaaattatgtatcact

SEQ ID NO: 279059 - DNA, 25 bp, Probe sequence
atgcccaaaacagtatttattccgg

SEQ ID NO: 279060 - DNA, 25 bp, Probe sequence
acaaaattatgtatcactttaggtt

SEQ ID NO: 279061 - DNA, 25 bp, Probe sequence
aattatgtatcactttaggtttaat

SEQ ID NO: 279062 - DNA, 25 bp, Probe sequence
taggtttaatttttgatattatctt

SEQ ID NO: 279063 - DNA, 25 bp, Probe sequence
caaaattatgtatcactttaggttt

SEQ ID NO: 279064 - DNA, 25 bp, Probe sequence
gtttaatttttgatattatcttaat

SEQ ID NO: 279065 - DNA, 25 bp, Probe sequence
tgcccaaaacagtatttattccgga

SEQ ID NO: 279066 - DNA, 25 bp, Probe sequence
tacaaaattatgtatcactttaggt

SEQ ID NO: 279067 - DNA, 25 bp, Probe sequence
tatgtatcactttaggtttaatttt

SEQ ID NO: 279068 - DNA, 25 bp, Probe sequence
tattacaaaattatgtatcacttta

SEQ ID NO: 279069 - DNA, 25 bp, Probe sequence
tttaatttttgatattatcttaatt

SEQ ID NO: 279070 - DNA, 25 bp, Probe sequence
tttattacaaaattatgtatcactt

SEQ ID NO: 279071 - DNA, 25 bp, Probe sequence
ttattacaaaattatgtatcacttt

SEQ ID NO: 279072 - DNA, 25 bp, Probe sequence
ttatgtatcactttaggtttaattt

SEQ ID NO: 279073 - DNA, 25 bp, Probe sequence
ttacaaaattatgtatcactttagg

SEQ ID NO: 279074 - DNA, 25 bp, Probe sequence
attattttcattggatcaccttctt

SEQ ID NO: 279075 - DNA, 25 bp, Probe sequence
attttcattggatcaccttctttct

SEQ ID NO: 279076 - DNA, 25 bp, Probe sequence
atatattattttcattggatcacct

SEQ ID NO: 279077 - DNA, 25 bp, Probe sequence
atattattttcattggatcaccttc

SEQ ID NO: 279078 - DNA, 25 bp, Probe sequence
atgaaacgacggacatttccagtaa

SEQ ID NO: 279079 - DNA, 25 bp, Probe sequence
acgacggacatttccagtaaatgaa

SEQ ID NO: 279080 - DNA, 25 bp, Probe sequence
aaatatattattttcattggatcac

SEQ ID NO: 279081 - DNA, 25 bp, Probe sequence
aaacgacggacatttccagtaaatg

SEQ ID NO: 279082 - DNA, 25 bp, Probe sequence
aacgacggacatttccagtaaatga

SEQ ID NO: 279083 - DNA, 25 bp, Probe sequence
aatatattattttcattggatcacc

SEQ ID NO: 279084 - DNA, 25 bp, Probe sequence
cggacatttccagtaaatgaaaaat

SEQ ID NO: 279085 - DNA, 25 bp, Probe sequence
cgacggacatttccagtaaatgaaa

SEQ ID NO: 279086 - DNA, 25 bp, Probe sequence
gaaacgacggacatttccagtaaat

SEQ ID NO: 279087 - DNA, 25 bp, Probe sequence
tgaaacgacggacatttccagtaaa

SEQ ID NO: 279088 - DNA, 25 bp, Probe sequence
gacggacatttccagtaaatgaaaa

SEQ ID NO: 279089 - DNA, 25 bp, Probe sequence
ggacatttccagtaaatgaaaaata

SEQ ID NO: 279090 - DNA, 25 bp, Probe sequence
tattttcattggatcaccttctttc

SEQ ID NO: 279091 - DNA, 25 bp, Probe sequence
tatattattttcattggatcacctt

SEQ ID NO: 279092 - DNA, 25 bp, Probe sequence
tattattttcattggatcaccttct

SEQ ID NO: 279093 - DNA, 25 bp, Probe sequence
tttcattggatcaccttctttcttc

SEQ ID NO: 279094 - DNA, 25 bp, Probe sequence
ttttaaattaagtagtcattacaat

SEQ ID NO: 279095 - DNA, 25 bp, Probe sequence
ttttcattggatcaccttctttctt

SEQ ID NO: 279096 - DNA, 25 bp, Probe sequence
ttattttcattggatcaccttcttt

SEQ ID NO: 279097 - DNA, 25 bp, Probe sequence
ctgccctgtcacgcaggatatcgcg

SEQ ID NO: 279098 - DNA, 25 bp, Probe sequence
cctgccctgtcacgcaggatatcgc

SEQ ID NO: 279099 - DNA, 25 bp, Probe sequence
ccctgccctgtcacgcaggatatcg

SEQ ID NO: 279100 - DNA, 25 bp, Probe sequence
tgccctgtcacgcaggatatcgcgg

SEQ ID NO: 279101 - DNA, 25 bp, Probe sequence
caagtaacagtaacaaacatttaag

SEQ ID NO: 279102 - DNA, 25 bp, Probe sequence
caacaagtaacagtaacaaacattt

SEQ ID NO: 279103 - DNA, 25 bp, Probe sequence
ccaacaagtaacagtaacaaacatt

SEQ ID NO: 279104 - DNA, 25 bp, Probe sequence
taacagtaacaaacatttaagaaat

SEQ ID NO: 279105 - DNA, 25 bp, Probe sequence
ttccaaagcagggggccaaggggct

SEQ ID NO: 279106 - DNA, 25 bp, Probe sequence
accagaagtgggcttaggtaaaatg

SEQ ID NO: 279107 - DNA, 25 bp, Probe sequence
atgaagttaccagaagtgggcttag

SEQ ID NO: 279108 - DNA, 25 bp, Probe sequence
accaccaataaggtttccaaagcag

SEQ ID NO: 279109 - DNA, 25 bp, Probe sequence
tccaaagcagggggccaaggggctg

SEQ ID NO: 279110 - DNA, 25 bp, Probe sequence
ccaaagcagggggccaaggggctgg

SEQ ID NO: 279111 - DNA, 25 bp, Probe sequence
caaagcagggggccaaggggctggg

SEQ ID NO: 279112 - DNA, 25 bp, Probe sequence
caccaccaataaggtttccaaagca

SEQ ID NO: 279113 - DNA, 25 bp, Probe sequence
caccaataaggtttccaaagcaggg

SEQ ID NO: 279114 - DNA, 25 bp, Probe sequence
cagaagtgggcttaggtaaaatggg

SEQ ID NO: 279115 - DNA, 25 bp, Probe sequence
ccagaagtgggcttaggtaaaatgg

SEQ ID NO: 279116 - DNA, 25 bp, Probe sequence
ccaccaataaggtttccaaagcagg

SEQ ID NO: 279117 - DNA, 25 bp, Probe sequence
gccaaataagaattaaagaccttgg

SEQ ID NO: 279118 - DNA, 25 bp, Probe sequence
gaagttaccagaagtgggcttaggt

SEQ ID NO: 279119 - DNA, 25 bp, Probe sequence
ggccaaataagaattaaagaccttg

SEQ ID NO: 279120 - DNA, 25 bp, Probe sequence
tgaagttaccagaagtgggcttagg

SEQ ID NO: 279121 - DNA, 25 bp, Probe sequence
taccagaagtgggcttaggtaaaat

SEQ ID NO: 279122 - DNA, 25 bp, Probe sequence
ttttaccagttatccaaccggcatt

SEQ ID NO: 279123 - DNA, 25 bp, Probe sequence
attttaccagttatccaaccggcat

SEQ ID NO: 279124 - DNA, 25 bp, Probe sequence
caccaaatccaccggaagaacccat

SEQ ID NO: 279125 - DNA, 25 bp, Probe sequence
caagttcaattttaccagttatcca

SEQ ID NO: 279126 - DNA, 25 bp, Probe sequence
gaagaacccattccggaaggtattg

SEQ ID NO: 279127 - DNA, 25 bp, Probe sequence
tccaagttcaattttaccagttatc

SEQ ID NO: 279128 - DNA, 25 bp, Probe sequence
tctccaccaaatccaccggaagaac

SEQ ID NO: 279129 - DNA, 25 bp, Probe sequence
tcaattttaccagttatccaaccgg

SEQ ID NO: 279130 - DNA, 25 bp, Probe sequence
tattttccaagttcaattttaccag

SEQ ID NO: 279131 - DNA, 25 bp, Probe sequence
tttaccagttatccaaccggcattt

SEQ ID NO: 279132 - DNA, 25 bp, Probe sequence
ttcaattttaccagttatccaaccg

SEQ ID NO: 279133 - DNA, 25 bp, Probe sequence
ttccaagttcaattttaccagttat

SEQ ID NO: 279134 - DNA, 25 bp, Probe sequence
attggtagtcatttagataaagaaa

SEQ ID NO: 279135 - DNA, 25 bp, Probe sequence
atttaattggtagtcatttagataa

SEQ ID NO: 279136 - DNA, 25 bp, Probe sequence
atagatttaattggtagtcatttag

SEQ ID NO: 279137 - DNA, 25 bp, Probe sequence
atcgaagatttaaatcattctattt

SEQ ID NO: 279138 - DNA, 25 bp, Probe sequence
agtattcaaaatcacgagaagaaat

SEQ ID NO: 279139 - DNA, 25 bp, Probe sequence
agatttaattggtagtcatttagat

SEQ ID NO: 279140 - DNA, 25 bp, Probe sequence
agaaatagatttaattggtagtcat

SEQ ID NO: 279141 - DNA, 25 bp, Probe sequence
agaaaagtattcaaaatcacgagaa

SEQ ID NO: 279142 - DNA, 25 bp, Probe sequence
aaatagatttaattggtagtcattt

SEQ ID NO: 279143 - DNA, 25 bp, Probe sequence
aaatcgaagatttaaatcattctat

SEQ ID NO: 279144 - DNA, 25 bp, Probe sequence
aaagtattcaaaatcacgagaagaa

SEQ ID NO: 279145 - DNA, 25 bp, Probe sequence
aaaagtattcaaaatcacgagaaga

SEQ ID NO: 279146 - DNA, 25 bp, Probe sequence
aagaaaagtattcaaaatcacgaga

SEQ ID NO: 279147 - DNA, 25 bp, Probe sequence
aagtattcaaaatcacgagaagaaa

SEQ ID NO: 279148 - DNA, 25 bp, Probe sequence
aatcgaagatttaaatcattctatt

SEQ ID NO: 279149 - DNA, 25 bp, Probe sequence
aatagatttaattggtagtcattta

SEQ ID NO: 279150 - DNA, 25 bp, Probe sequence
aattggtagtcatttagataaagaa

SEQ ID NO: 279151 - DNA, 25 bp, Probe sequence
cgaagatttaaatcattctatttag

SEQ ID NO: 279152 - DNA, 25 bp, Probe sequence
gaagaaaagtattcaaaatcacgag

SEQ ID NO: 279153 - DNA, 25 bp, Probe sequence
gaaaagtattcaaaatcacgagaag

SEQ ID NO: 279154 - DNA, 25 bp, Probe sequence
gaaatcgaagatttaaatcattcta

SEQ ID NO: 279155 - DNA, 25 bp, Probe sequence
gaaatagatttaattggtagtcatt

SEQ ID NO: 279156 - DNA, 25 bp, Probe sequence
gatttaattggtagtcatttagata

SEQ ID NO: 279157 - DNA, 25 bp, Probe sequence
gtattcaaaatcacgagaagaaata

SEQ ID NO: 279158 - DNA, 25 bp, Probe sequence
gtagtcatttagataaagaaatcga

SEQ ID NO: 279159 - DNA, 25 bp, Probe sequence
ggtagtcatttagataaagaaatcg

SEQ ID NO: 279160 - DNA, 25 bp, Probe sequence
ggaagaaaagtattcaaaatcacga

SEQ ID NO: 279161 - DNA, 25 bp, Probe sequence
tggtagtcatttagataaagaaatc

SEQ ID NO: 279162 - DNA, 25 bp, Probe sequence
tcgaagatttaaatcattctattta

SEQ ID NO: 279163 - DNA, 25 bp, Probe sequence
taattggtagtcatttagataaaga

SEQ ID NO: 279164 - DNA, 25 bp, Probe sequence
tagatttaattggtagtcatttaga

SEQ ID NO: 279165 - DNA, 25 bp, Probe sequence
tttaattggtagtcatttagataaa

SEQ ID NO: 279166 - DNA, 25 bp, Probe sequence
ttaattggtagtcatttagataaag

SEQ ID NO: 279167 - DNA, 25 bp, Probe sequence
ttggtagtcatttagataaagaaat

SEQ ID NO: 279168 - DNA, 25 bp, Probe sequence
ataccgaaatatagcattattaaat

SEQ ID NO: 279169 - DNA, 25 bp, Probe sequence
accgaaatatagcattattaaatca

SEQ ID NO: 279170 - DNA, 25 bp, Probe sequence
aaataccgaaatatagcattattaa

SEQ ID NO: 279171 - DNA, 25 bp, Probe sequence
aaaataccgaaatatagcattatta

SEQ ID NO: 279172 - DNA, 25 bp, Probe sequence
aataccgaaatatagcattattaaa

SEQ ID NO: 279173 - DNA, 25 bp, Probe sequence
cgaaatatagcattattaaatcaaa

SEQ ID NO: 279174 - DNA, 25 bp, Probe sequence
ccgaaatatagcattattaaatcaa

SEQ ID NO: 279175 - DNA, 25 bp, Probe sequence
gaaatatagcattattaaatcaaaa

SEQ ID NO: 279176 - DNA, 25 bp, Probe sequence
tgaaaagaaaacacacgtattataa

SEQ ID NO: 279177 - DNA, 25 bp, Probe sequence
taaaataccgaaatatagcattatt

SEQ ID NO: 279178 - DNA, 25 bp, Probe sequence
taccgaaatatagcattattaaatc

SEQ ID NO: 279179 - DNA, 25 bp, Probe sequence
tttaaaataccgaaatatagcatta

SEQ ID NO: 279180 - DNA, 25 bp, Probe sequence
ttaaaataccgaaatatagcattat

SEQ ID NO: 279181 - DNA, 25 bp, Probe sequence
ttgaaaagaaaacacacgtattata

SEQ ID NO: 279182 - DNA, 25 bp, Probe sequence
atgaaaaatgtgtcaatttacaaaa

SEQ ID NO: 279183 - DNA, 25 bp, Probe sequence
atgtgtcaatttacaaaacaactca

SEQ ID NO: 279184 - DNA, 25 bp, Probe sequence
aaatgtgtcaatttacaaaacaact

SEQ ID NO: 279185 - DNA, 25 bp, Probe sequence
aatgtgtcaatttacaaaacaactc

SEQ ID NO: 279186 - DNA, 25 bp, Probe sequence
caactcaagaattaagttttgtaag

SEQ ID NO: 279187 - DNA, 25 bp, Probe sequence
gaaaaatgtgtcaatttacaaaaca

SEQ ID NO: 279188 - DNA, 25 bp, Probe sequence
gtcaatttacaaaacaactcaagaa

SEQ ID NO: 279189 - DNA, 25 bp, Probe sequence
gtgtcaatttacaaaacaactcaag

SEQ ID NO: 279190 - DNA, 25 bp, Probe sequence
tgtgtcaatttacaaaacaactcaa

SEQ ID NO: 279191 - DNA, 25 bp, Probe sequence
tgtcaatttacaaaacaactcaaga

SEQ ID NO: 279192 - DNA, 25 bp, Probe sequence
tgaaaaatgtgtcaatttacaaaac

SEQ ID NO: 279193 - DNA, 25 bp, Probe sequence
taacgaaacatttaactttaatgct

SEQ ID NO: 279194 - DNA, 25 bp, Probe sequence
agcgcctgctttgcacgcaggaggt

SEQ ID NO: 279195 - DNA, 25 bp, Probe sequence
caggaggtcagcggttcgatcccgc

SEQ ID NO: 279196 - DNA, 25 bp, Probe sequence
cacgcaggaggtcagcggttcgatc

SEQ ID NO: 279197 - DNA, 25 bp, Probe sequence
ctgctttgcacgcaggaggtcagcg

SEQ ID NO: 279198 - DNA, 25 bp, Probe sequence
ctttgcacgcaggaggtcagcggtt

SEQ ID NO: 279199 - DNA, 25 bp, Probe sequence
cgcctgctttgcacgcaggaggtca

SEQ ID NO: 279200 - DNA, 25 bp, Probe sequence
cctgctttgcacgcaggaggtcagc

SEQ ID NO: 279201 - DNA, 25 bp, Probe sequence
gcctgctttgcacgcaggaggtcag

SEQ ID NO: 279202 - DNA, 25 bp, Probe sequence
gcgcctgctttgcacgcaggaggtc

SEQ ID NO: 279203 - DNA, 25 bp, Probe sequence
gctttgcacgcaggaggtcagcggt

SEQ ID NO: 279204 - DNA, 25 bp, Probe sequence
gcacgcaggaggtcagcggttcgat

SEQ ID NO: 279205 - DNA, 25 bp, Probe sequence
tgctttgcacgcaggaggtcagcgg

SEQ ID NO: 279206 - DNA, 25 bp, Probe sequence
tgcacgcaggaggtcagcggttcga

SEQ ID NO: 279207 - DNA, 25 bp, Probe sequence
tttgcacgcaggaggtcagcggttc

SEQ ID NO: 279208 - DNA, 25 bp, Probe sequence
ttgcacgcaggaggtcagcggttcg

SEQ ID NO: 279209 - DNA, 25 bp, Probe sequence
atctaaaagccattttcataataat

SEQ ID NO: 279210 - DNA, 25 bp, Probe sequence
atgtataaagattccaattaataaa

SEQ ID NO: 279211 - DNA, 25 bp, Probe sequence
agccattttcataataatgttaaat

SEQ ID NO: 279212 - DNA, 25 bp, Probe sequence
acatctaaaagccattttcataata

SEQ ID NO: 279213 - DNA, 25 bp, Probe sequence
acaacatctaaaagccattttcata

SEQ ID NO: 279214 - DNA, 25 bp, Probe sequence
aaagccattttcataataatgttaa

SEQ ID NO: 279215 - DNA, 25 bp, Probe sequence
aaacaacatctaaaagccattttca

SEQ ID NO: 279216 - DNA, 25 bp, Probe sequence
aacaacatctaaaagccattttcat

SEQ ID NO: 279217 - DNA, 25 bp, Probe sequence
aacatctaaaagccattttcataat

SEQ ID NO: 279218 - DNA, 25 bp, Probe sequence
aagccattttcataataatgttaaa

SEQ ID NO: 279219 - DNA, 25 bp, Probe sequence
aatgtataaagattccaattaataa

SEQ ID NO: 279220 - DNA, 25 bp, Probe sequence
caacatctaaaagccattttcataa

SEQ ID NO: 279221 - DNA, 25 bp, Probe sequence
catctaaaagccattttcataataa

SEQ ID NO: 279222 - DNA, 25 bp, Probe sequence
ccattttcataataatgttaaatca

SEQ ID NO: 279223 - DNA, 25 bp, Probe sequence
gccattttcataataatgttaaatc

SEQ ID NO: 279224 - DNA, 25 bp, Probe sequence
tgtataaagattccaattaataaaa

SEQ ID NO: 279225 - DNA, 25 bp, Probe sequence
tctaaaagccattttcataataatg

SEQ ID NO: 279226 - DNA, 25 bp, Probe sequence
taaaacaacatctaaaagccatttt

SEQ ID NO: 279227 - DNA, 25 bp, Probe sequence
taaagattccaattaataaaaatag

SEQ ID NO: 279228 - DNA, 25 bp, Probe sequence
ttaaaacaacatctaaaagccattt

SEQ ID NO: 279229 - DNA, 25 bp, Probe sequence
atatacccaccacatttggtggaga

SEQ ID NO: 279230 - DNA, 25 bp, Probe sequence
attatatacccaccacatttggtgg

SEQ ID NO: 279231 - DNA, 25 bp, Probe sequence
atacccaccacatttggtggagaac

SEQ ID NO: 279232 - DNA, 25 bp, Probe sequence
acccaccacatttggtggagaacct

SEQ ID NO: 279233 - DNA, 25 bp, Probe sequence
aaattatatacccaccacatttggt

SEQ ID NO: 279234 - DNA, 25 bp, Probe sequence
aattatatacccaccacatttggtg

SEQ ID NO: 279235 - DNA, 25 bp, Probe sequence
caccacatttggtggagaacctaaa

SEQ ID NO: 279236 - DNA, 25 bp, Probe sequence
ctttaaattatatacccaccacatt

SEQ ID NO: 279237 - DNA, 25 bp, Probe sequence
cccaccacatttggtggagaaccta

SEQ ID NO: 279238 - DNA, 25 bp, Probe sequence
ccaccacatttggtggagaacctaa

SEQ ID NO: 279239 - DNA, 25 bp, Probe sequence
tctttaaattatatacccaccacat

SEQ ID NO: 279240 - DNA, 25 bp, Probe sequence
taaattatatacccaccacatttgg

SEQ ID NO: 279241 - DNA, 25 bp, Probe sequence
tacccaccacatttggtggagaacc

SEQ ID NO: 279242 - DNA, 25 bp, Probe sequence
tatatacccaccacatttggtggag

SEQ ID NO: 279243 - DNA, 25 bp, Probe sequence
tatacccaccacatttggtggagaa

SEQ ID NO: 279244 - DNA, 25 bp, Probe sequence
tttaaattatatacccaccacattt

SEQ ID NO: 279245 - DNA, 25 bp, Probe sequence
ttatatacccaccacatttggtgga

SEQ ID NO: 279246 - DNA, 25 bp, Probe sequence
ttaaattatatacccaccacatttg

SEQ ID NO: 279247 - DNA, 25 bp, Probe sequence
ttctttaaattatatacccaccaca

SEQ ID NO: 279248 - DNA, 25 bp, Probe sequence
aggcttgtttaattattaatgattt

SEQ ID NO: 279249 - DNA, 25 bp, Probe sequence
agagcagtataataaagttgttaat

SEQ ID NO: 279250 - DNA, 25 bp, Probe sequence
agcagtataataaagttgttaatat

SEQ ID NO: 279251 - DNA, 25 bp, Probe sequence
aaagagcagtataataaagttgtta

SEQ ID NO: 279252 - DNA, 25 bp, Probe sequence
aagagcagtataataaagttgttaa

SEQ ID NO: 279253 - DNA, 25 bp, Probe sequence
aaggcttgtttaattattaatgatt

SEQ ID NO: 279254 - DNA, 25 bp, Probe sequence
gcttgtttaattattaatgatttta

SEQ ID NO: 279255 - DNA, 25 bp, Probe sequence
gagcagtataataaagttgttaata

SEQ ID NO: 279256 - DNA, 25 bp, Probe sequence
ggcttgtttaattattaatgatttt

SEQ ID NO: 279257 - DNA, 25 bp, Probe sequence
taaggcttgtttaattattaatgat

SEQ ID NO: 279258 - DNA, 25 bp, Probe sequence
taaagagcagtataataaagttgtt

SEQ ID NO: 279259 - DNA, 25 bp, Probe sequence
tttaaggcttgtttaattattaatg

SEQ ID NO: 279260 - DNA, 25 bp, Probe sequence
ttaaggcttgtttaattattaatga

SEQ ID NO: 279261 - DNA, 25 bp, Probe sequence
acaacaaaatggtatcaaaaatggt

SEQ ID NO: 279262 - DNA, 25 bp, Probe sequence
acaaaatggtatcaaaaatggtatc

SEQ ID NO: 279263 - DNA, 25 bp, Probe sequence
aaatggtatcatttgtagttatttt

SEQ ID NO: 279264 - DNA, 25 bp, Probe sequence
aacaaaatggtatcaaaaatggtat

SEQ ID NO: 279265 - DNA, 25 bp, Probe sequence
caacaaaatggtatcaaaaatggta

SEQ ID NO: 279266 - DNA, 25 bp, Probe sequence
ctgttttacaacaaaatggtatcaa

SEQ ID NO: 279267 - DNA, 25 bp, Probe sequence
tgttttacaacaaaatggtatcaaa

SEQ ID NO: 279268 - DNA, 25 bp, Probe sequence
tctgttttacaacaaaatggtatca

SEQ ID NO: 279269 - DNA, 25 bp, Probe sequence
tttgtagttattttagcttcacata

SEQ ID NO: 279270 - DNA, 25 bp, Probe sequence
ttctgttttacaacaaaatggtatc

SEQ ID NO: 279271 - DNA, 25 bp, Probe sequence
ttgtagttattttagcttcacatat

SEQ ID NO: 279272 - DNA, 25 bp, Probe sequence
caggcagttttttaatcaaattttg

SEQ ID NO: 279273 - DNA, 25 bp, Probe sequence
gccaggcagttttttaatcaaattt

SEQ ID NO: 279274 - DNA, 25 bp, Probe sequence
tgccaggcagttttttaatcaaatt

SEQ ID NO: 279275 - DNA, 25 bp, Probe sequence
ttgccaggcagttttttaatcaaat

SEQ ID NO: 279276 - DNA, 25 bp, Probe sequence
atttgcagcaaataaattaaccttg

SEQ ID NO: 279277 - DNA, 25 bp, Probe sequence
ataaattaaccttgactattttcag

SEQ ID NO: 279278 - DNA, 25 bp, Probe sequence
agcaaataaattaaccttgactatt

SEQ ID NO: 279279 - DNA, 25 bp, Probe sequence
accttgactattttcagaaaattct

SEQ ID NO: 279280 - DNA, 25 bp, Probe sequence
actattttcagaaaattctgtataa

SEQ ID NO: 279281 - DNA, 25 bp, Probe sequence
cagcaaataaattaaccttgactat

SEQ ID NO: 279282 - DNA, 25 bp, Probe sequence
cagaaaattctgtataaataacgaa

SEQ ID NO: 279283 - DNA, 25 bp, Probe sequence
cttgactattttcagaaaattctgt

SEQ ID NO: 279284 - DNA, 25 bp, Probe sequence
ccttgactattttcagaaaattctg

SEQ ID NO: 279285 - DNA, 25 bp, Probe sequence
gcagcaaataaattaaccttgacta

SEQ ID NO: 279286 - DNA, 25 bp, Probe sequence
gcaaataaattaaccttgactattt

SEQ ID NO: 279287 - DNA, 25 bp, Probe sequence
gactattttcagaaaattctgtata

SEQ ID NO: 279288 - DNA, 25 bp, Probe sequence
gattaaatatgaagaggtgttttta

SEQ ID NO: 279289 - DNA, 25 bp, Probe sequence
ggattaaatatgaagaggtgttttt

SEQ ID NO: 279290 - DNA, 25 bp, Probe sequence
tgactattttcagaaaattctgtat

SEQ ID NO: 279291 - DNA, 25 bp, Probe sequence
tgcagcaaataaattaaccttgact

SEQ ID NO: 279292 - DNA, 25 bp, Probe sequence
taaccttgactattttcagaaaatt

SEQ ID NO: 279293 - DNA, 25 bp, Probe sequence
taaattaaccttgactattttcaga

SEQ ID NO: 279294 - DNA, 25 bp, Probe sequence
tttgcagcaaataaattaaccttga

SEQ ID NO: 279295 - DNA, 25 bp, Probe sequence
ttaaccttgactattttcagaaaat

SEQ ID NO: 279296 - DNA, 25 bp, Probe sequence
ttgcagcaaataaattaaccttgac

SEQ ID NO: 279297 - DNA, 25 bp, Probe sequence
ttgactattttcagaaaattctgta

SEQ ID NO: 279298 - DNA, 25 bp, Probe sequence
atcgcagtagtagaaattactttat

SEQ ID NO: 279299 - DNA, 25 bp, Probe sequence
atgtgcaccagtatcgcagtagtag

SEQ ID NO: 279300 - DNA, 25 bp, Probe sequence
agtatcgcagtagtagaaattactt

SEQ ID NO: 279301 - DNA, 25 bp, Probe sequence
agtagtagaaattactttatctcat

SEQ ID NO: 279302 - DNA, 25 bp, Probe sequence
accagtatcgcagtagtagaaatta

SEQ ID NO: 279303 - DNA, 25 bp, Probe sequence
caccagtatcgcagtagtagaaatt

SEQ ID NO: 279304 - DNA, 25 bp, Probe sequence
cagtatcgcagtagtagaaattact

SEQ ID NO: 279305 - DNA, 25 bp, Probe sequence
cagtagtagaaattactttatctca

SEQ ID NO: 279306 - DNA, 25 bp, Probe sequence
cgcagtagtagaaattactttatct

SEQ ID NO: 279307 - DNA, 25 bp, Probe sequence
ccagtatcgcagtagtagaaattac

SEQ ID NO: 279308 - DNA, 25 bp, Probe sequence
gcagtagtagaaattactttatctc

SEQ ID NO: 279309 - DNA, 25 bp, Probe sequence
gcaccagtatcgcagtagtagaaat

SEQ ID NO: 279310 - DNA, 25 bp, Probe sequence
gtatcgcagtagtagaaattacttt

SEQ ID NO: 279311 - DNA, 25 bp, Probe sequence
gtgcaccagtatcgcagtagtagaa

SEQ ID NO: 279312 - DNA, 25 bp, Probe sequence
tgtgcaccagtatcgcagtagtaga

SEQ ID NO: 279313 - DNA, 25 bp, Probe sequence
tgcaccagtatcgcagtagtagaaa

SEQ ID NO: 279314 - DNA, 25 bp, Probe sequence
tcgcagtagtagaaattactttatc

SEQ ID NO: 279315 - DNA, 25 bp, Probe sequence
tatcgcagtagtagaaattacttta

SEQ ID NO: 279316 - DNA, 25 bp, Probe sequence
attttcgccatgccacgaaattagc

SEQ ID NO: 279317 - DNA, 25 bp, Probe sequence
atgccacgaaattagcatcatgcta

SEQ ID NO: 279318 - DNA, 25 bp, Probe sequence
acgaaattagcatcatgctagcaag

SEQ ID NO: 279319 - DNA, 25 bp, Probe sequence
aaattagcatcatgctagcaagtta

SEQ ID NO: 279320 - DNA, 25 bp, Probe sequence
aattagcatcatgctagcaagttaa

SEQ ID NO: 279321 - DNA, 25 bp, Probe sequence
cacgaaattagcatcatgctagcaa

SEQ ID NO: 279322 - DNA, 25 bp, Probe sequence
catgccacgaaattagcatcatgct

SEQ ID NO: 279323 - DNA, 25 bp, Probe sequence
cggattttcgccatgccacgaaatt

SEQ ID NO: 279324 - DNA, 25 bp, Probe sequence
cgaaattagcatcatgctagcaagt

SEQ ID NO: 279325 - DNA, 25 bp, Probe sequence
cgccatgccacgaaattagcatcat

SEQ ID NO: 279326 - DNA, 25 bp, Probe sequence
ccatgccacgaaattagcatcatgc

SEQ ID NO: 279327 - DNA, 25 bp, Probe sequence
ccacgaaattagcatcatgctagca

SEQ ID NO: 279328 - DNA, 25 bp, Probe sequence
gccatgccacgaaattagcatcatg

SEQ ID NO: 279329 - DNA, 25 bp, Probe sequence
gccacgaaattagcatcatgctagc

SEQ ID NO: 279330 - DNA, 25 bp, Probe sequence
gaaattagcatcatgctagcaagtt

SEQ ID NO: 279331 - DNA, 25 bp, Probe sequence
gattttcgccatgccacgaaattag

SEQ ID NO: 279332 - DNA, 25 bp, Probe sequence
ggattttcgccatgccacgaaatta

SEQ ID NO: 279333 - DNA, 25 bp, Probe sequence
tgccacgaaattagcatcatgctag

SEQ ID NO: 279334 - DNA, 25 bp, Probe sequence
tcgccatgccacgaaattagcatca

SEQ ID NO: 279335 - DNA, 25 bp, Probe sequence
tacggattttcgccatgccacgaaa

SEQ ID NO: 279336 - DNA, 25 bp, Probe sequence
tttcgccatgccacgaaattagcat

SEQ ID NO: 279337 - DNA, 25 bp, Probe sequence
ttttcgccatgccacgaaattagca

SEQ ID NO: 279338 - DNA, 25 bp, Probe sequence
ttcgccatgccacgaaattagcatc

SEQ ID NO: 279339 - DNA, 25 bp, Probe sequence
aaattgaactaatgaatgtcatttg

SEQ ID NO: 279340 - DNA, 25 bp, Probe sequence
aaaattgaactaatgaatgtcattt

SEQ ID NO: 279341 - DNA, 25 bp, Probe sequence
aattgaactaatgaatgtcatttgt

SEQ ID NO: 279342 - DNA, 25 bp, Probe sequence
taaaattgaactaatgaatgtcatt

SEQ ID NO: 279343 - DNA, 25 bp, Probe sequence
attgctcaggttgttaactgaaaaa

SEQ ID NO: 279344 - DNA, 25 bp, Probe sequence
atctaaaaaagaattgctcaggttg

SEQ ID NO: 279345 - DNA, 25 bp, Probe sequence
atgatgttagacggtaagttatcta

SEQ ID NO: 279346 - DNA, 25 bp, Probe sequence
agaattgctcaggttgttaactgaa

SEQ ID NO: 279347 - DNA, 25 bp, Probe sequence
acaatgatgttagacggtaagttat

SEQ ID NO: 279348 - DNA, 25 bp, Probe sequence
aaagaattgctcaggttgttaactg

SEQ ID NO: 279349 - DNA, 25 bp, Probe sequence
aaaagaattgctcaggttgttaact

SEQ ID NO: 279350 - DNA, 25 bp, Probe sequence
aagaattgctcaggttgttaactga

SEQ ID NO: 279351 - DNA, 25 bp, Probe sequence
aatgatgttagacggtaagttatct

SEQ ID NO: 279352 - DNA, 25 bp, Probe sequence
aattgctcaggttgttaactgaaaa

SEQ ID NO: 279353 - DNA, 25 bp, Probe sequence
caatgatgttagacggtaagttatc

SEQ ID NO: 279354 - DNA, 25 bp, Probe sequence
ctaaaaaagaattgctcaggttgtt

SEQ ID NO: 279355 - DNA, 25 bp, Probe sequence
gaattgctcaggttgttaactgaaa

SEQ ID NO: 279356 - DNA, 25 bp, Probe sequence
gacaatgatgttagacggtaagtta

SEQ ID NO: 279357 - DNA, 25 bp, Probe sequence
gatgttagacggtaagttatctaaa

SEQ ID NO: 279358 - DNA, 25 bp, Probe sequence
gtgacaatgatgttagacggtaagt

SEQ ID NO: 279359 - DNA, 25 bp, Probe sequence
tgatgttagacggtaagttatctaa

SEQ ID NO: 279360 - DNA, 25 bp, Probe sequence
tgacaatgatgttagacggtaagtt

SEQ ID NO: 279361 - DNA, 25 bp, Probe sequence
tgctcaggttgttaactgaaaaaaa

SEQ ID NO: 279362 - DNA, 25 bp, Probe sequence
tctaaaaaagaattgctcaggttgt

SEQ ID NO: 279363 - DNA, 25 bp, Probe sequence
taaaaaagaattgctcaggttgtta

SEQ ID NO: 279364 - DNA, 25 bp, Probe sequence
ttgctcaggttgttaactgaaaaaa

SEQ ID NO: 279365 - DNA, 25 bp, Probe sequence
agcaatacttaaaagcaccatttaa

SEQ ID NO: 279366 - DNA, 25 bp, Probe sequence
aaagcaatacttaaaagcaccattt

SEQ ID NO: 279367 - DNA, 25 bp, Probe sequence
aaaaagcaatacttaaaagcaccat

SEQ ID NO: 279368 - DNA, 25 bp, Probe sequence
aaaagcaatacttaaaagcaccatt

SEQ ID NO: 279369 - DNA, 25 bp, Probe sequence
aagcaatacttaaaagcaccattta

SEQ ID NO: 279370 - DNA, 25 bp, Probe sequence
caatacttaaaagcaccatttaatt

SEQ ID NO: 279371 - DNA, 25 bp, Probe sequence
caccatttaatttagggaaaagatg

SEQ ID NO: 279372 - DNA, 25 bp, Probe sequence
gcaccatttaatttagggaaaagat

SEQ ID NO: 279373 - DNA, 25 bp, Probe sequence
gcaatacttaaaagcaccatttaat

SEQ ID NO: 279374 - DNA, 25 bp, Probe sequence
tacttaaaagcaccatttaatttag

SEQ ID NO: 279375 - DNA, 25 bp, Probe sequence
ggtcgcgcggatcatgatgccaacc

SEQ ID NO: 279376 - DNA, 25 bp, Probe sequence
ggatcatgatgccaacctcttacgt

SEQ ID NO: 279377 - DNA, 25 bp, Probe sequence
tgccaacctcttacgtgcgcctttc

SEQ ID NO: 279378 - DNA, 25 bp, Probe sequence
gcgcctttctgccggacgcgagcag

SEQ ID NO: 279379 - DNA, 25 bp, Probe sequence
gccggacgcgagcagatgaacgaac

SEQ ID NO: 279380 - DNA, 25 bp, Probe sequence
cgagcagatgaacgaacagactcag

SEQ ID NO: 279381 - DNA, 25 bp, Probe sequence
gatgaacgaacagactcaggcgatg

SEQ ID NO: 279382 - DNA, 25 bp, Probe sequence
aacagactcaggcgatgtgctttat

SEQ ID NO: 279383 - DNA, 25 bp, Probe sequence
tcaggcgatgtgctttatggcaggc

SEQ ID NO: 279384 - DNA, 25 bp, Probe sequence
gtgctttatggcaggcgcaaactcg

SEQ ID NO: 279385 - DNA, 25 bp, Probe sequence
atggcaggcgcaaactcgattttct

SEQ ID NO: 279386 - DNA, 25 bp, Probe sequence
tacggttgcaaactgctgaccacgc

SEQ ID NO: 279387 - DNA, 25 bp, Probe sequence
caaactgctgaccacgccgaatccg

SEQ ID NO: 279388 - DNA, 25 bp, Probe sequence
gacctgcaactgttccgcaaactgg

SEQ ID NO: 279389 - DNA, 25 bp, Probe sequence
gggctaaatccgcagcaaactgccg

SEQ ID NO: 279390 - DNA, 25 bp, Probe sequence
cgcagcaaactgccgtgctggcagg

SEQ ID NO: 279391 - DNA, 25 bp, Probe sequence
acagcaacgtcttgaacaggcgctg

SEQ ID NO: 279392 - DNA, 25 bp, Probe sequence
cgtcttgaacaggcgctgatgaccc

SEQ ID NO: 279393 - DNA, 25 bp, Probe sequence
acaggcgctgatgaccccggacacc

SEQ ID NO: 279394 - DNA, 25 bp, Probe sequence
atattacaacgcggcagcattatga

SEQ ID NO: 279395 - DNA, 25 bp, Probe sequence
gacattgtcgcaagtcacagaatta

SEQ ID NO: 279396 - DNA, 25 bp, Probe sequence
attgtcgcaagtcacagaattattt

SEQ ID NO: 279397 - DNA, 25 bp, Probe sequence
gttgctggatctgctgtttgaagcg

SEQ ID NO: 279398 - DNA, 25 bp, Probe sequence
ggatctgctgtttgaagcgcagcag

SEQ ID NO: 279399 - DNA, 25 bp, Probe sequence
gcgcagcaggtgcatcgccagcatt

SEQ ID NO: 279400 - DNA, 25 bp, Probe sequence
gcaggtgcatcgccagcatttcgat

SEQ ID NO: 279401 - DNA, 25 bp, Probe sequence
gcatcgccagcatttcgatcctcgt

SEQ ID NO: 279402 - DNA, 25 bp, Probe sequence
gcatttcgatcctcgtcaggtgcag

SEQ ID NO: 279403 - DNA, 25 bp, Probe sequence
cgatcctcgtcaggtgcaggtcagc

SEQ ID NO: 279404 - DNA, 25 bp, Probe sequence
tcgtcaggtgcaggtcagcacgttg

SEQ ID NO: 279405 - DNA, 25 bp, Probe sequence
gcaggtcagcacgttgctgtcgatt

SEQ ID NO: 279406 - DNA, 25 bp, Probe sequence
cagcacgttgctgtcgattaagacc

SEQ ID NO: 279407 - DNA, 25 bp, Probe sequence
gctgtcgattaagaccggagcttgt

SEQ ID NO: 279408 - DNA, 25 bp, Probe sequence
agcttgtccggaagattgcaaatac

SEQ ID NO: 279409 - DNA, 25 bp, Probe sequence
agattgcaaatactgcccgcaaacg

SEQ ID NO: 279410 - DNA, 25 bp, Probe sequence
caaatactgcccgcaaacgtcgcgc

SEQ ID NO: 279411 - DNA, 25 bp, Probe sequence
tgaacaggtgctggagtcggcgcgc

SEQ ID NO: 279412 - DNA, 25 bp, Probe sequence
ggagtcggcgcgcaaagcgaaagcg

SEQ ID NO: 279413 - DNA, 25 bp, Probe sequence
caaagcgaaagcggcaggatcgacg

SEQ ID NO: 279414 - DNA, 25 bp, Probe sequence
ggcaggatcgacgcgcttctgtatg

SEQ ID NO: 279415 - DNA, 25 bp, Probe sequence
gccggagttttacggcaatatcatc

SEQ ID NO: 279416 - DNA, 25 bp, Probe sequence
gttttacggcaatatcatcaccaca

SEQ ID NO: 279417 - DNA, 25 bp, Probe sequence
gcaatatcatcaccacacgcactta

SEQ ID NO: 279418 - DNA, 25 bp, Probe sequence
atcaccacacgcacttatcaggaac

SEQ ID NO: 279419 - DNA, 25 bp, Probe sequence
acgcacttatcaggaacgcctcgat

SEQ ID NO: 279420 - DNA, 25 bp, Probe sequence
atacgctggaaaaagtgcgcgatgc

SEQ ID NO: 279421 - DNA, 25 bp, Probe sequence
ggaaaaagtgcgcgatgccgggatc

SEQ ID NO: 279422 - DNA, 25 bp, Probe sequence
agtgcgcgatgccgggatcaaagtc

SEQ ID NO: 279423 - DNA, 25 bp, Probe sequence
gccgggatcaaagtctgttctggcg

SEQ ID NO: 279424 - DNA, 25 bp, Probe sequence
aagtctgttctggcggcattgtggg

SEQ ID NO: 279425 - DNA, 25 bp, Probe sequence
aagatcgcgccggattattgctgca

SEQ ID NO: 279426 - DNA, 25 bp, Probe sequence
gccggattattgctgcaactggcaa

SEQ ID NO: 279427 - DNA, 25 bp, Probe sequence
attgctgcaactggcaaacctgccg

SEQ ID NO: 279428 - DNA, 25 bp, Probe sequence
cgccggaaagcgtgccaatcaacat

SEQ ID NO: 279429 - DNA, 25 bp, Probe sequence
aagcgtgccaatcaacatgctggtg

SEQ ID NO: 279430 - DNA, 25 bp, Probe sequence
caatcaacatgctggtgaaggtgaa

SEQ ID NO: 279431 - DNA, 25 bp, Probe sequence
tggtgaaggtgaaaggcacgccgct

SEQ ID NO: 279432 - DNA, 25 bp, Probe sequence
acgccgcttgccgataacgatgatg

SEQ ID NO: 279433 - DNA, 25 bp, Probe sequence
ttgccgataacgatgatgtcgatgc

SEQ ID NO: 279434 - DNA, 25 bp, Probe sequence
acgatgatgtcgatgcctttgattt

SEQ ID NO: 279435 - DNA, 25 bp, Probe sequence
tacccgaacgtcatcaggcgtggca

SEQ ID NO: 279436 - DNA, 25 bp, Probe sequence
ggtggacgagcgtccgcatgctaat

SEQ ID NO: 279437 - DNA, 25 bp, Probe sequence
cgtccgcatgctaatcgctttttac

SEQ ID NO: 279438 - DNA, 25 bp, Probe sequence
tttaccgccagatgaaatcgaacag

SEQ ID NO: 279439 - DNA, 25 bp, Probe sequence
gatgaaatcgaacagtcgctgaacg

SEQ ID NO: 279440 - DNA, 25 bp, Probe sequence
aacagtcgctgaacggcgtgcatta

SEQ ID NO: 279441 - DNA, 25 bp, Probe sequence
acatcatattcagcccatcacgctg

SEQ ID NO: 279442 - DNA, 25 bp, Probe sequence
ttcagcccatcacgctgtggtttga

SEQ ID NO: 279443 - DNA, 25 bp, Probe sequence
atcacgctgtggtttgatgatgcgc

SEQ ID NO: 279444 - DNA, 25 bp, Probe sequence
ggtttgatgatgcgctcagtgccat

SEQ ID NO: 279445 - DNA, 25 bp, Probe sequence
atgatgcgctcagtgccatgcgttc

SEQ ID NO: 279446 - DNA, 25 bp, Probe sequence
ctcagtgccatgcgttcgctgaaag

SEQ ID NO: 279447 - DNA, 25 bp, Probe sequence
catgcgttcgctgaaaggcatcggt

SEQ ID NO: 279448 - DNA, 25 bp, Probe sequence
ctgaaaggcatcggtgccacgcatc

SEQ ID NO: 279449 - DNA, 25 bp, Probe sequence
ggcatcggtgccacgcatcttcatg

SEQ ID NO: 279450 - DNA, 25 bp, Probe sequence
tgccacgcatcttcatgaagggcgc

SEQ ID NO: 279451 - DNA, 25 bp, Probe sequence
atcttcatgaagggcgcgacccgcg

SEQ ID NO: 279452 - DNA, 25 bp, Probe sequence
attaacgcgttcgcagttgcagcga

SEQ ID NO: 279453 - DNA, 25 bp, Probe sequence
gcgttcgcagttgcagcgattgcaa

SEQ ID NO: 279454 - DNA, 25 bp, Probe sequence
agttgcagcgattgcaactggcctg

SEQ ID NO: 279455 - DNA, 25 bp, Probe sequence
cagcggcatttggtcgggcagccgc

SEQ ID NO: 279456 - DNA, 25 bp, Probe sequence
gtcgggcagccgcacactatgagca

SEQ ID NO: 279457 - DNA, 25 bp, Probe sequence
cgcacactatgagcaacatgcagat

SEQ ID NO: 279458 - DNA, 25 bp, Probe sequence
aacatgcagatctacagcgccagag

SEQ ID NO: 279459 - DNA, 25 bp, Probe sequence
tacagcgccagagtgctgacgcctt

SEQ ID NO: 279460 - DNA, 25 bp, Probe sequence
gagtgctgacgccttactggcaatg

SEQ ID NO: 279461 - DNA, 25 bp, Probe sequence
tactggcaatgcttccacagcgtaa

SEQ ID NO: 279462 - DNA, 25 bp, Probe sequence
gggttgtggacctggctggatgagc

SEQ ID NO: 279463 - DNA, 25 bp, Probe sequence
tgagccgccactggcgggaacgtca

SEQ ID NO: 279464 - DNA, 25 bp, Probe sequence
gcgcaggtgacggccttagatctct

SEQ ID NO: 279465 - DNA, 25 bp, Probe sequence
gccttagatctctcgccgccaatgc

SEQ ID NO: 279466 - DNA, 25 bp, Probe sequence
gccgccaatgcttgttcaggcacgc

SEQ ID NO: 279467 - DNA, 25 bp, Probe sequence
tgttcaggcacgccagaaggatgcc

SEQ ID NO: 279468 - DNA, 25 bp, Probe sequence
agaaggatgccgcagaccattatct

SEQ ID NO: 279469 - DNA, 25 bp, Probe sequence
gccgcagaccattatctggcgggag

SEQ ID NO: 279470 - DNA, 25 bp, Probe sequence
cgttagcgactgcgacgttcgatct

SEQ ID NO: 279471 - DNA, 25 bp, Probe sequence
cgacgttcgatcttgcatggagcaa

SEQ ID NO: 279472 - DNA, 25 bp, Probe sequence
gatcttgcatggagcaatctcgcag

SEQ ID NO: 279473 - DNA, 25 bp, Probe sequence
caatctcgcagtgcagtggtgcggt

SEQ ID NO: 279474 - DNA, 25 bp, Probe sequence
atttatccacggcactccgcgagct

SEQ ID NO: 279475 - DNA, 25 bp, Probe sequence
ggtgctggcggctggtttacgccgc

SEQ ID NO: 279476 - DNA, 25 bp, Probe sequence
ctttctgacactttcacttttgcag

SEQ ID NO: 279477 - DNA, 25 bp, Probe sequence
tgacactttcacttttgcagattgg

SEQ ID NO: 279478 - DNA, 25 bp, Probe sequence
tttgcagattgggtaacacaggaac

SEQ ID NO: 279479 - DNA, 25 bp, Probe sequence
gaaaacgtcacgctgaatatatgac

SEQ ID NO: 279480 - DNA, 25 bp, Probe sequence
aaacgtcacgctgaatatatgacca

SEQ ID NO: 279481 - DNA, 25 bp, Probe sequence
cgtcacgctgaatatatgaccacgc

SEQ ID NO: 279482 - DNA, 25 bp, Probe sequence
acgctgaatatatgaccacgctcac

SEQ ID NO: 279483 - DNA, 25 bp, Probe sequence
ctgaatatatgaccacgctcacccg

SEQ ID NO: 279484 - DNA, 25 bp, Probe sequence
gaatatatgaccacgctcacccgca

SEQ ID NO: 279485 - DNA, 25 bp, Probe sequence
cccgcatgattcccgcgccgctgct

SEQ ID NO: 279486 - DNA, 25 bp, Probe sequence
catgattcccgcgccgctgctggga

SEQ ID NO: 279487 - DNA, 25 bp, Probe sequence
gattcccgcgccgctgctgggagag

SEQ ID NO: 279488 - DNA, 25 bp, Probe sequence
cgcgccgctgctgggagagatcccc

SEQ ID NO: 279489 - DNA, 25 bp, Probe sequence
ccgctgctgggagagatcccctggc

SEQ ID NO: 279490 - DNA, 25 bp, Probe sequence
ctgctgggagagatcccctggcttg

SEQ ID NO: 279491 - DNA, 25 bp, Probe sequence
gctgggagagatcccctggcttgca

SEQ ID NO: 279492 - DNA, 25 bp, Probe sequence
ggagagatcccctggcttgcagaaa

SEQ ID NO: 279493 - DNA, 25 bp, Probe sequence
gagatcccctggcttgcagaaaatc

SEQ ID NO: 279494 - DNA, 25 bp, Probe sequence
atcccctggcttgcagaaaatccag

SEQ ID NO: 279495 - DNA, 25 bp, Probe sequence
gggaaaactgtcgccagttgtgcac

SEQ ID NO: 279496 - DNA, 25 bp, Probe sequence
cgccagttgtgcacttttacaagcc

SEQ ID NO: 279497 - DNA, 25 bp, Probe sequence
cacttttacaagccgcaaaggcagc

SEQ ID NO: 279498 - DNA, 25 bp, Probe sequence
caagccgcaaaggcagcaggctacc

SEQ ID NO: 279499 - DNA, 25 bp, Probe sequence
gcaaaggcagcaggctaccggacgg

SEQ ID NO: 279500 - DNA, 25 bp, Probe sequence
aggtttacgcaatagcgacgcgctg

SEQ ID NO: 279501 - DNA, 25 bp, Probe sequence
cgcaatagcgacgcgctggcgttac

SEQ ID NO: 279502 - DNA, 25 bp, Probe sequence
gcgacgcgctggcgttacagcgcaa

SEQ ID NO: 279503 - DNA, 25 bp, Probe sequence
gcgctggcgttacagcgcaacagca

SEQ ID NO: 279504 - DNA, 25 bp, Probe sequence
cgttacagcgcaacagcagcctgca

SEQ ID NO: 279505 - DNA, 25 bp, Probe sequence
agcgcaacagcagcctgcagctgga

SEQ ID NO: 279506 - DNA, 25 bp, Probe sequence
cagcagcctgcagctggattacgca

SEQ ID NO: 279507 - DNA, 25 bp, Probe sequence
ctgcagctggattacgcaacagtaa

SEQ ID NO: 279508 - DNA, 25 bp, Probe sequence
catcagcgcgcaagagggcagaccg

SEQ ID NO: 279509 - DNA, 25 bp, Probe sequence
cgcaagagggcagaccgatagaatc

SEQ ID NO: 279510 - DNA, 25 bp, Probe sequence
gggcagaccgatagaatcattggta

SEQ ID NO: 279511 - DNA, 25 bp, Probe sequence
gaccgatagaatcattggtaatgag

SEQ ID NO: 279512 - DNA, 25 bp, Probe sequence
agaatcattggtaatgagcgccgga

SEQ ID NO: 279513 - DNA, 25 bp, Probe sequence
ttggtaatgagcgccggattacgcg

SEQ ID NO: 279514 - DNA, 25 bp, Probe sequence
atgagcgccggattacgcgcgcttg

SEQ ID NO: 279515 - DNA, 25 bp, Probe sequence
cgctggttagcaccgcaggtgtaga

SEQ ID NO: 279516 - DNA, 25 bp, Probe sequence
caccgcaggtgtagagaaggcactt

SEQ ID NO: 279517 - DNA, 25 bp, Probe sequence
tggtcgagcgatggatttccgtctc

SEQ ID NO: 279518 - DNA, 25 bp, Probe sequence
atggatttccgtctctggtgtagct

SEQ ID NO: 279519 - DNA, 25 bp, Probe sequence
gtctctggtgtagctgatgatccga

SEQ ID NO: 279520 - DNA, 25 bp, Probe sequence
tgtagctgatgatccgaataactac

SEQ ID NO: 279521 - DNA, 25 bp, Probe sequence
accagccagctatcaactcgcgccc

SEQ ID NO: 279522 - DNA, 25 bp, Probe sequence
gcaactcatcgattgatttacggcg

SEQ ID NO: 279523 - DNA, 25 bp, Probe sequence
gattgatttacggcgctaaggatga

SEQ ID NO: 279524 - DNA, 25 bp, Probe sequence
taaggatgactctggtcagagatac

SEQ ID NO: 279525 - DNA, 25 bp, Probe sequence
tggtcagagatacctggcctggtct

SEQ ID NO: 279526 - DNA, 25 bp, Probe sequence
ctggtctggacacagtgcccgtgtc

SEQ ID NO: 279527 - DNA, 25 bp, Probe sequence
gtgcccgtgtcggagccgcgcgaga

SEQ ID NO: 279528 - DNA, 25 bp, Probe sequence
cgagatatggcccgcgctggagttt

SEQ ID NO: 279529 - DNA, 25 bp, Probe sequence
ggagtttcaataccggagatcatgc

SEQ ID NO: 279530 - DNA, 25 bp, Probe sequence
ggagatcatgcaagctggtggctgg

SEQ ID NO: 279531 - DNA, 25 bp, Probe sequence
ctggtggctggaccaatgtaaatat

SEQ ID NO: 279532 - DNA, 25 bp, Probe sequence
ccaatgtaaatattgtcatgaacta

SEQ ID NO: 279533 - DNA, 25 bp, Probe sequence
ttgtcatgaactatatccgtaacct

SEQ ID NO: 279534 - DNA, 25 bp, Probe sequence
tagtgaaacaggggcaatggtgcgc

SEQ ID NO: 279535 - DNA, 25 bp, Probe sequence
atttgcctgcattaccggtcgatgc

SEQ ID NO: 279536 - DNA, 25 bp, Probe sequence
taccggtcgatgcaacgagtgatga

SEQ ID NO: 279537 - DNA, 25 bp, Probe sequence
gagtgatgaggttcgcaagaacctg

SEQ ID NO: 279538 - DNA, 25 bp, Probe sequence
gcaagaacctgatggacatgttcag

SEQ ID NO: 279539 - DNA, 25 bp, Probe sequence
gacatgttcagggatcgccaggcgt

SEQ ID NO: 279540 - DNA, 25 bp, Probe sequence
gccaggcgttttctgagcatacctg

SEQ ID NO: 279541 - DNA, 25 bp, Probe sequence
gcggcatggtgcaagttgaataacc

SEQ ID NO: 279542 - DNA, 25 bp, Probe sequence
gaagatgttcgcgattatcttctat

SEQ ID NO: 279543 - DNA, 25 bp, Probe sequence
tctatatcttcaggcgcgcggtctg

SEQ ID NO: 279544 - DNA, 25 bp, Probe sequence
gcaacatttgggccagctaaacatg

SEQ ID NO: 279545 - DNA, 25 bp, Probe sequence
ccagctaaacatgcttcatcgtcgg

SEQ ID NO: 279546 - DNA, 25 bp, Probe sequence
ccgggctgccacgaccaagtgacag

SEQ ID NO: 279547 - DNA, 25 bp, Probe sequence
gaccaagtgacagcaatgctgtttc

SEQ ID NO: 279548 - DNA, 25 bp, Probe sequence
aatgctgtttcactggttatgcggc

SEQ ID NO: 279549 - DNA, 25 bp, Probe sequence
atgccggtgaacgtgcaaaacaggc

SEQ ID NO: 279550 - DNA, 25 bp, Probe sequence
acgtgcaaaacaggctctagcgttc

SEQ ID NO: 279551 - DNA, 25 bp, Probe sequence
ctctagcgttcgaacgcactgattt

SEQ ID NO: 279552 - DNA, 25 bp, Probe sequence
tcgttcactcatggaaaatagcgat

SEQ ID NO: 279553 - DNA, 25 bp, Probe sequence
atggaaaatagcgatcgctgccagg

SEQ ID NO: 279554 - DNA, 25 bp, Probe sequence
tcagggttaaagatatctcacgtac

SEQ ID NO: 279555 - DNA, 25 bp, Probe sequence
attcggtcaattgtcactgtcatca

SEQ ID NO: 279556 - DNA, 25 bp, Probe sequence
aggatcgccatccggatcacggcaa

SEQ ID NO: 279557 - DNA, 25 bp, Probe sequence
agaagaagcagctgaagcagcccgc

SEQ ID NO: 279558 - DNA, 25 bp, Probe sequence
aagaattcagctaacgcttccagac

SEQ ID NO: 279559 - DNA, 25 bp, Probe sequence
aatgagtgatcaggcaattcggtca

SEQ ID NO: 279560 - DNA, 25 bp, Probe sequence
catcagaatctgtcggccaaaagcg

SEQ ID NO: 279561 - DNA, 25 bp, Probe sequence
ctactcctctgacgaatgggtatat

SEQ ID NO: 279562 - DNA, 25 bp, Probe sequence
gccttccggcgcataaagtcagcaa

SEQ ID NO: 279563 - DNA, 25 bp, Probe sequence
gctgaagcagcccgcatattaggcg

SEQ ID NO: 279564 - DNA, 25 bp, Probe sequence
gcagcccgcatattaggcgcagata

SEQ ID NO: 279565 - DNA, 25 bp, Probe sequence
gaagcagctgaagcagcccgcatat

SEQ ID NO: 279566 - DNA, 25 bp, Probe sequence
gataaatggttttcatcagccggat

SEQ ID NO: 279567 - DNA, 25 bp, Probe sequence
gtcactgtcatcagaatctgtcggc

SEQ ID NO: 279568 - DNA, 25 bp, Probe sequence
ggtatattgaaatcgttgaagcgag

SEQ ID NO: 279569 - DNA, 25 bp, Probe sequence
ggcaatgcggctgcactggtggaag

SEQ ID NO: 279570 - DNA, 25 bp, Probe sequence
tgatcaggcaattcggtcaattgtc

SEQ ID NO: 279571 - DNA, 25 bp, Probe sequence
tccggatcacggcaatgcggctgca

SEQ ID NO: 279572 - DNA, 25 bp, Probe sequence
tcaattgtcactgtcatcagaatct

SEQ ID NO: 279573 - DNA, 25 bp, Probe sequence
ttttgttattgatatctcggataca

SEQ ID NO: 279574 - DNA, 25 bp, Probe sequence
ttgatatctcggatacaatagaggc

SEQ ID NO: 279575 - DNA, 25 bp, Probe sequence
agggatcggagccatcatcgcgcca

SEQ ID NO: 279576 - DNA, 25 bp, Probe sequence
agcagcaaggacatccggatgaaaa

SEQ ID NO: 279577 - DNA, 25 bp, Probe sequence
agcttcatcatgaccagaagcttga

SEQ ID NO: 279578 - DNA, 25 bp, Probe sequence
aaattttgcgctcggtgcgatactg

SEQ ID NO: 279579 - DNA, 25 bp, Probe sequence
aaaaattgcattagagcacggagtc

SEQ ID NO: 279580 - DNA, 25 bp, Probe sequence
catgaccagaagcttgacgcaccaa

SEQ ID NO: 279581 - DNA, 25 bp, Probe sequence
caagcggaactgcgcttaaaacagc

SEQ ID NO: 279582 - DNA, 25 bp, Probe sequence
cgctcggtgcgatactgatgatgaa

SEQ ID NO: 279583 - DNA, 25 bp, Probe sequence
gaagcttgacgcaccaagcggaact

SEQ ID NO: 279584 - DNA, 25 bp, Probe sequence
gagccatcatcgcgccaaattttgc

SEQ ID NO: 279585 - DNA, 25 bp, Probe sequence
gagattattgagcttcatcatgacc

SEQ ID NO: 279586 - DNA, 25 bp, Probe sequence
gatatccatgcctgttttacagaaa

SEQ ID NO: 279587 - DNA, 25 bp, Probe sequence
gtgatgcctgttgagtcagatgctt

SEQ ID NO: 279588 - DNA, 25 bp, Probe sequence
tggcagaacgaacaccacattttga

SEQ ID NO: 279589 - DNA, 25 bp, Probe sequence
tgctttcatttacacagatatccat

SEQ ID NO: 279590 - DNA, 25 bp, Probe sequence
tgccaactattttgaggatgttgag

SEQ ID NO: 279591 - DNA, 25 bp, Probe sequence
tcatcgcgccaaattttgcgctcgg

SEQ ID NO: 279592 - DNA, 25 bp, Probe sequence
tacacagatatccatgcctgtttta

SEQ ID NO: 279593 - DNA, 25 bp, Probe sequence
tatctgatgtgatgcctgttgagtc

SEQ ID NO: 279594 - DNA, 25 bp, Probe sequence
ttgagtcagatgctttcatttacac

SEQ ID NO: 279595 - DNA, 25 bp, Probe sequence
cccgctgaccgcgcagccgcatgaa

SEQ ID NO: 279596 - DNA, 25 bp, Probe sequence
atgctgacgttcttgcttttggcgc

SEQ ID NO: 279597 - DNA, 25 bp, Probe sequence
atgaagattgatcagcttgtgtatg

SEQ ID NO: 279598 - DNA, 25 bp, Probe sequence
aggatatggttcaatttacgactgc

SEQ ID NO: 279599 - DNA, 25 bp, Probe sequence
agcaaatcggtgcactgatcgctgc

SEQ ID NO: 279600 - DNA, 25 bp, Probe sequence
aaattcttgtgcgcacacttgatga

SEQ ID NO: 279601 - DNA, 25 bp, Probe sequence
cacagtgatgatgtcgagatcggaa

SEQ ID NO: 279602 - DNA, 25 bp, Probe sequence
catgtcaggcgttaaactgtcagtc

SEQ ID NO: 279603 - DNA, 25 bp, Probe sequence
cattaatccgtttatgtgatgtgta

SEQ ID NO: 279604 - DNA, 25 bp, Probe sequence
gcgcacacttgatgaaggtgttttc

SEQ ID NO: 279605 - DNA, 25 bp, Probe sequence
gctcgccacaaatatgggtactgcg

SEQ ID NO: 279606 - DNA, 25 bp, Probe sequence
gctgccaatgcactcgatcttgtca

SEQ ID NO: 279607 - DNA, 25 bp, Probe sequence
gcttttggcgcccacagtgatgatg

SEQ ID NO: 279608 - DNA, 25 bp, Probe sequence
gatgtctcggcattaatccgtttat

SEQ ID NO: 279609 - DNA, 25 bp, Probe sequence
tgatgtgtattccattccgctcgcc

SEQ ID NO: 279610 - DNA, 25 bp, Probe sequence
tgaaaattgctttgatcgcgcatga

SEQ ID NO: 279611 - DNA, 25 bp, Probe sequence
tgcactgatcgctgccaatgcactc

SEQ ID NO: 279612 - DNA, 25 bp, Probe sequence
tcatgatctatacgcaaccggaacc

SEQ ID NO: 279613 - DNA, 25 bp, Probe sequence
tcaatttacgactgcctatcgggat

SEQ ID NO: 279614 - DNA, 25 bp, Probe sequence
ttcatgaggcgacaggtcttcaaat

SEQ ID NO: 279615 - DNA, 25 bp, Probe sequence
attcatattcatttgtatccaaggt

SEQ ID NO: 279616 - DNA, 25 bp, Probe sequence
ataagctgtacaatcgtttcatcat

SEQ ID NO: 279617 - DNA, 25 bp, Probe sequence
atgatgaaccgcttcatgccactga

SEQ ID NO: 279618 - DNA, 25 bp, Probe sequence
agctgtacaatcgtttcatcattcg

SEQ ID NO: 279619 - DNA, 25 bp, Probe sequence
accgcttcatgccactgaatacgtt

SEQ ID NO: 279620 - DNA, 25 bp, Probe sequence
aagatgatgaaccgcttcatgccac

SEQ ID NO: 279621 - DNA, 25 bp, Probe sequence
aatcgtttcatcattcggcgtgcga

SEQ ID NO: 279622 - DNA, 25 bp, Probe sequence
catattcatttgtatccaaggtgct

SEQ ID NO: 279623 - DNA, 25 bp, Probe sequence
catttgtatccaaggtgctgaatct

SEQ ID NO: 279624 - DNA, 25 bp, Probe sequence
ctgtacaatcgtttcatcattcggc

SEQ ID NO: 279625 - DNA, 25 bp, Probe sequence
cgtttcatcattcggcgtgcgaatt

SEQ ID NO: 279626 - DNA, 25 bp, Probe sequence
gcacaactctttatacggttggctc

SEQ ID NO: 279627 - DNA, 25 bp, Probe sequence
gagacgcaggcacaactctttatac

SEQ ID NO: 279628 - DNA, 25 bp, Probe sequence
tggagagattcatattcatttgtat

SEQ ID NO: 279629 - DNA, 25 bp, Probe sequence
tgggagacgcaggcacaactcttta

SEQ ID NO: 279630 - DNA, 25 bp, Probe sequence
tgaaccgcttcatgccactgaatac

SEQ ID NO: 279631 - DNA, 25 bp, Probe sequence
tacaatcgtttcatcattcggcgtg

SEQ ID NO: 279632 - DNA, 25 bp, Probe sequence
tatccaaggtgctgaatcttggagg

SEQ ID NO: 279633 - DNA, 25 bp, Probe sequence
tattcgttatacggaagatgatgaa

SEQ ID NO: 279634 - DNA, 25 bp, Probe sequence
tttgtatccaaggtgctgaatcttg

SEQ ID NO: 279635 - DNA, 25 bp, Probe sequence
atgcgagcaaagcattctcatcagt

SEQ ID NO: 279636 - DNA, 25 bp, Probe sequence
atgtcgtatccggaggagagctata

SEQ ID NO: 279637 - DNA, 25 bp, Probe sequence
aggtgtggatgctctctatttagcg

SEQ ID NO: 279638 - DNA, 25 bp, Probe sequence
cacctctttacgtatatgatgtggc

SEQ ID NO: 279639 - DNA, 25 bp, Probe sequence
catcagtcgcaatgattcagctcgc

SEQ ID NO: 279640 - DNA, 25 bp, Probe sequence
cattctcatcagtcgcaatgattca

SEQ ID NO: 279641 - DNA, 25 bp, Probe sequence
gcaggcgtttatttctgcagggctg

SEQ ID NO: 279642 - DNA, 25 bp, Probe sequence
gcagacaaaatcaacatggtcattt

SEQ ID NO: 279643 - DNA, 25 bp, Probe sequence
gcaaagcattctcatcagtcgcaat

SEQ ID NO: 279644 - DNA, 25 bp, Probe sequence
gtatatgatgtggctttaatacgtg

SEQ ID NO: 279645 - DNA, 25 bp, Probe sequence
gggctgaaagcacaggtggcatatg

SEQ ID NO: 279646 - DNA, 25 bp, Probe sequence
ggagagctatatacggctgttgcag

SEQ ID NO: 279647 - DNA, 25 bp, Probe sequence
ggcatatgcgagcaaagcattctca

SEQ ID NO: 279648 - DNA, 25 bp, Probe sequence
tggatgctctctatttagcggagaa

SEQ ID NO: 279649 - DNA, 25 bp, Probe sequence
tggtacacctctttacgtatatgat

SEQ ID NO: 279650 - DNA, 25 bp, Probe sequence
tcgcaatgattcagctcgctgagga

SEQ ID NO: 279651 - DNA, 25 bp, Probe sequence
tctttagatgtcgtatccggaggag

SEQ ID NO: 279652 - DNA, 25 bp, Probe sequence
tagaaatcggaggtgtggatgctct

SEQ ID NO: 279653 - DNA, 25 bp, Probe sequence
tttatttctgcagggctgaaagcac

SEQ ID NO: 279654 - DNA, 25 bp, Probe sequence
tttaagcaggcgtttatttctgcag

SEQ ID NO: 279655 - DNA, 25 bp, Probe sequence
attacaatcggaacacattcagctg

SEQ ID NO: 279656 - DNA, 25 bp, Probe sequence
atttctatgaaatcgcgcttcttga

SEQ ID NO: 279657 - DNA, 25 bp, Probe sequence
atacgcatgactacattacaacggg

SEQ ID NO: 279658 - DNA, 25 bp, Probe sequence
gatggcgcttgagcaccgcatcggc

SEQ ID NO: 279659 - DNA, 25 bp, Probe sequence
agctgctgggtgtccattgccatat

SEQ ID NO: 279660 - DNA, 25 bp, Probe sequence
agcgcatacgcatgactacattaca

SEQ ID NO: 279661 - DNA, 25 bp, Probe sequence
aacacattcagctgctgggtgtcca

SEQ ID NO: 279662 - DNA, 25 bp, Probe sequence
aatcggaacacattcagctgctggg

SEQ ID NO: 279663 - DNA, 25 bp, Probe sequence
aatcgcgcttcttgaagacctatgt

SEQ ID NO: 279664 - DNA, 25 bp, Probe sequence
cattcagctgctgggtgtccattgc

SEQ ID NO: 279665 - DNA, 25 bp, Probe sequence
ctatgaaatcgcgcttcttgaagac

SEQ ID NO: 279666 - DNA, 25 bp, Probe sequence
cgcttgagcaccgcatcggctgcat

SEQ ID NO: 279667 - DNA, 25 bp, Probe sequence
gcatcggctgcattgtggtggataa

SEQ ID NO: 279668 - DNA, 25 bp, Probe sequence
gcaccgcatcggctgcattgtggtg

SEQ ID NO: 279669 - DNA, 25 bp, Probe sequence
gatcacgcccggagtagaagcgcat

SEQ ID NO: 279670 - DNA, 25 bp, Probe sequence
gtcactccatcgatgttcttcttcg

SEQ ID NO: 279671 - DNA, 25 bp, Probe sequence
ggataatttctatgaaatcgcgctt

SEQ ID NO: 279672 - DNA, 25 bp, Probe sequence
tcgatcttcataacggacaaactga

SEQ ID NO: 279673 - DNA, 25 bp, Probe sequence
tagaagcgcatacgcatgactacat

SEQ ID NO: 279674 - DNA, 25 bp, Probe sequence
ttcggatcacgcccggagtagaagc

SEQ ID NO: 279675 - DNA, 25 bp, Probe sequence
atggcagcttctacatacgaattaa

SEQ ID NO: 279676 - DNA, 25 bp, Probe sequence
aggggccatgcaggagcttgaagca

SEQ ID NO: 279677 - DNA, 25 bp, Probe sequence
agtgaggcttctgggtgcataccag

SEQ ID NO: 279678 - DNA, 25 bp, Probe sequence
aagtttgtcagtgaccatcccgagc

SEQ ID NO: 279679 - DNA, 25 bp, Probe sequence
catgctgccgcaggatgatcagtcc

SEQ ID NO: 279680 - DNA, 25 bp, Probe sequence
cttctgggtgcataccagtcttacc

SEQ ID NO: 279681 - DNA, 25 bp, Probe sequence
ctgcatagagtgctgtctgcatttt

SEQ ID NO: 279682 - DNA, 25 bp, Probe sequence
ctgtctcccgatgaaaacatatctt

SEQ ID NO: 279683 - DNA, 25 bp, Probe sequence
cggggcgctgcatagagtgctgtct

SEQ ID NO: 279684 - DNA, 25 bp, Probe sequence
ccatcccgagctgaatatcggggtc

SEQ ID NO: 279685 - DNA, 25 bp, Probe sequence
gccaatgatatggcagcttctacat

SEQ ID NO: 279686 - DNA, 25 bp, Probe sequence
gaattcaaaattgagctctaggccc

SEQ ID NO: 279687 - DNA, 25 bp, Probe sequence
gagctgaatatcggggtcattgcca

SEQ ID NO: 279688 - DNA, 25 bp, Probe sequence
gtattgattccaggggccatgcagg

SEQ ID NO: 279689 - DNA, 25 bp, Probe sequence
gtcagtgaccatcccgagctgaata

SEQ ID NO: 279690 - DNA, 25 bp, Probe sequence
gtgctgtctgcattttcttggagaa

SEQ ID NO: 279691 - DNA, 25 bp, Probe sequence
ggatgatcagtccggggcgctgcat

SEQ ID NO: 279692 - DNA, 25 bp, Probe sequence
tgatgatgtattgattccaggggcc

SEQ ID NO: 279693 - DNA, 25 bp, Probe sequence
tatcggggtcattgccaatgatatg

SEQ ID NO: 279694 - DNA, 25 bp, Probe sequence
ttaatggtcatgctgccgcaggatg

SEQ ID NO: 279695 - DNA, 25 bp, Probe sequence
atcttgtccgtgaagatgtattgcc

SEQ ID NO: 279696 - DNA, 25 bp, Probe sequence
agcagattcagtagcagatgccgtt

SEQ ID NO: 279697 - DNA, 25 bp, Probe sequence
accagaccattccgcttcaaggcag

SEQ ID NO: 279698 - DNA, 25 bp, Probe sequence
aagatgtattgcccgatgcaatgag

SEQ ID NO: 279699 - DNA, 25 bp, Probe sequence
cactgtctatcagtacgtcggcaat

SEQ ID NO: 279700 - DNA, 25 bp, Probe sequence
cagtagcagatgccgttcaaaaggt

SEQ ID NO: 279701 - DNA, 25 bp, Probe sequence
ctgattctggaagcaacgttctttc

SEQ ID NO: 279702 - DNA, 25 bp, Probe sequence
ctcagcttcttcaggcggtagctga

SEQ ID NO: 279703 - DNA, 25 bp, Probe sequence
cgcttcaaggcagagcaaatgtgac

SEQ ID NO: 279704 - DNA, 25 bp, Probe sequence
ccattccgcttcaaggcagagcaaa

SEQ ID NO: 279705 - DNA, 25 bp, Probe sequence
gcgttatctcagcttcttcaggcgg

SEQ ID NO: 279706 - DNA, 25 bp, Probe sequence
gcaaatgtgacactgtctatcagta

SEQ ID NO: 279707 - DNA, 25 bp, Probe sequence
gacattttatcttgtccgtgaagat

SEQ ID NO: 279708 - DNA, 25 bp, Probe sequence
gtattgcccgatgcaatgagaaaaa

SEQ ID NO: 279709 - DNA, 25 bp, Probe sequence
ggaggataggtcaggtgcgttatct

SEQ ID NO: 279710 - DNA, 25 bp, Probe sequence
ggcggtagctgattctggaagcaac

SEQ ID NO: 279711 - DNA, 25 bp, Probe sequence
tcttcaggcggtagctgattctgga

SEQ ID NO: 279712 - DNA, 25 bp, Probe sequence
tctttccattcaccagaccattccg

SEQ ID NO: 279713 - DNA, 25 bp, Probe sequence
tacagggatgctgtttttccattct

SEQ ID NO: 279714 - DNA, 25 bp, Probe sequence
taggtcaggtgcgttatctcagctt

SEQ ID NO: 279715 - DNA, 25 bp, Probe sequence
attgcgcaatgccataaatttcttc

SEQ ID NO: 279716 - DNA, 25 bp, Probe sequence
aggtccagcagctacatttacacat

SEQ ID NO: 279717 - DNA, 25 bp, Probe sequence
acacgcgattgcgcaatgccataaa

SEQ ID NO: 279718 - DNA, 25 bp, Probe sequence
aatttactcacattcacacgcgatt

SEQ ID NO: 279719 - DNA, 25 bp, Probe sequence
cacttgctcgtccatccctcaagag

SEQ ID NO: 279720 - DNA, 25 bp, Probe sequence
catgaacagcctttgccaatcgtgg

SEQ ID NO: 279721 - DNA, 25 bp, Probe sequence
ctatttaatacatgaacagcctttg

SEQ ID NO: 279722 - DNA, 25 bp, Probe sequence
cgaacatgttgcttaccgcaccatt

SEQ ID NO: 279723 - DNA, 25 bp, Probe sequence
ccgcaccattccggagtgtatagat

SEQ ID NO: 279724 - DNA, 25 bp, Probe sequence
gctacatttacacatctagcagtca

SEQ ID NO: 279725 - DNA, 25 bp, Probe sequence
gaaatattaggttcaggtgcataag

SEQ ID NO: 279726 - DNA, 25 bp, Probe sequence
gacgttgccgattcaccagcacttg

SEQ ID NO: 279727 - DNA, 25 bp, Probe sequence
gagctcgacaaaatttactcacatt

SEQ ID NO: 279728 - DNA, 25 bp, Probe sequence
gatgcagccgttgcaggcgaagttg

SEQ ID NO: 279729 - DNA, 25 bp, Probe sequence
gtgtatagatgcagccgttgcaggc

SEQ ID NO: 279730 - DNA, 25 bp, Probe sequence
gggtgaaatgacgttgccgattcac

SEQ ID NO: 279731 - DNA, 25 bp, Probe sequence
tcacattcacacgcgattgcgcaat

SEQ ID NO: 279732 - DNA, 25 bp, Probe sequence
tcaaaacggcgccgaacatgttgct

SEQ ID NO: 279733 - DNA, 25 bp, Probe sequence
tacacatctagcagtcagttcttgt

SEQ ID NO: 279734 - DNA, 25 bp, Probe sequence
ttatttaggtccagcagctacattt

SEQ ID NO: 279735 - DNA, 25 bp, Probe sequence
atatggaacggctctcagcggagca

SEQ ID NO: 279736 - DNA, 25 bp, Probe sequence
agtagagcacgtcgccgagatgaag

SEQ ID NO: 279737 - DNA, 25 bp, Probe sequence
agacgcgagagacgtgcttccgaag

SEQ ID NO: 279738 - DNA, 25 bp, Probe sequence
agaaggacacccggacaatgctggc

SEQ ID NO: 279739 - DNA, 25 bp, Probe sequence
cggcctgcatgaggatgacgagacc

SEQ ID NO: 279740 - DNA, 25 bp, Probe sequence
catgtccaaggattggccgcttgtc

SEQ ID NO: 279741 - DNA, 25 bp, Probe sequence
cgcttctctcgtcggcggacttgtg

SEQ ID NO: 279742 - DNA, 25 bp, Probe sequence
cggcggacttgtgatcggcctgcat

SEQ ID NO: 279743 - DNA, 25 bp, Probe sequence
cggagcaggcccaacgattctcgtc

SEQ ID NO: 279744 - DNA, 25 bp, Probe sequence
cccgaatgctgacattgacgtagtc

SEQ ID NO: 279745 - DNA, 25 bp, Probe sequence
cctcattgctgcgatcatgtccaag

SEQ ID NO: 279746 - DNA, 25 bp, Probe sequence
ccaaatgatccgcgtcccgaatgct

SEQ ID NO: 279747 - DNA, 25 bp, Probe sequence
gctcgcgcttcatttccctcattgt

SEQ ID NO: 279748 - DNA, 25 bp, Probe sequence
gaaggagtttccatatgccgatgcc

SEQ ID NO: 279749 - DNA, 25 bp, Probe sequence
gttccatcagccgtaccgggcgatg

SEQ ID NO: 279750 - DNA, 25 bp, Probe sequence
gtaccgggcgatgcttgtgcctgag

SEQ ID NO: 279751 - DNA, 25 bp, Probe sequence
tgtcattcctttttatgaagtgctg

SEQ ID NO: 279752 - DNA, 25 bp, Probe sequence
tgaagtgctgacaagagacgcgaga

SEQ ID NO: 279753 - DNA, 25 bp, Probe sequence
tgctgtcagcaatatcctcattgct

SEQ ID NO: 279754 - DNA, 25 bp, Probe sequence
tgccgatgccgtaaaagcaagtgct

SEQ ID NO: 279755 - DNA, 25 bp, Probe sequence
acacgattatgtgcgcgtcaacagg

SEQ ID NO: 279756 - DNA, 25 bp, Probe sequence
acacctcttattcacctgccgaagc

SEQ ID NO: 279757 - DNA, 25 bp, Probe sequence
cacttccgctgctgcggcagcatat

SEQ ID NO: 279758 - DNA, 25 bp, Probe sequence
cagcccgtgctaacatgaaatgcat

SEQ ID NO: 279759 - DNA, 25 bp, Probe sequence
catgagaaaaacggcacaggccttc

SEQ ID NO: 279760 - DNA, 25 bp, Probe sequence
ctgctgccttcgaagtgtgcgaaca

SEQ ID NO: 279761 - DNA, 25 bp, Probe sequence
cggcagcatatgcagcccgtgctaa

SEQ ID NO: 279762 - DNA, 25 bp, Probe sequence
ctgtaacagatcaaacaccggcgct

SEQ ID NO: 279763 - DNA, 25 bp, Probe sequence
gcggcggcaatcgtgcgcaatgaag

SEQ ID NO: 279764 - DNA, 25 bp, Probe sequence
gcgtcaacaggtaacacttccgctg

SEQ ID NO: 279765 - DNA, 25 bp, Probe sequence
gctggaaacatcactgcgtactgga

SEQ ID NO: 279766 - DNA, 25 bp, Probe sequence
gaattgagcttcatgtcaaaacgga

SEQ ID NO: 279767 - DNA, 25 bp, Probe sequence
gcaatcgtgcgcaatgaagtgattg

SEQ ID NO: 279768 - DNA, 25 bp, Probe sequence
gaaggcaatgacacgattatgtgcg

SEQ ID NO: 279769 - DNA, 25 bp, Probe sequence
gtccgttccatctgtgagaaatcac

SEQ ID NO: 279770 - DNA, 25 bp, Probe sequence
gggatcatttaaagatcgcggaatg

SEQ ID NO: 279771 - DNA, 25 bp, Probe sequence
ggaaaactcgctcaagctgtcatgt

SEQ ID NO: 279772 - DNA, 25 bp, Probe sequence
tgtgagaaatcaccgattgcccttg

SEQ ID NO: 279773 - DNA, 25 bp, Probe sequence
tgcattgtcatcatcccgaacggaa

SEQ ID NO: 279774 - DNA, 25 bp, Probe sequence
tcagtcaacccttaccgcattgaag

SEQ ID NO: 279775 - DNA, 25 bp, Probe sequence
atccttcacgcatatcagctgatcg

SEQ ID NO: 279776 - DNA, 25 bp, Probe sequence
acgaagccgacatgctgttctctgt

SEQ ID NO: 279777 - DNA, 25 bp, Probe sequence
actgatgatgaaatccttcacgcat

SEQ ID NO: 279778 - DNA, 25 bp, Probe sequence
aagatccgaacacagcggtcgacat

SEQ ID NO: 279779 - DNA, 25 bp, Probe sequence
aaggcagcaaggtcgtagctgtgtt

SEQ ID NO: 279780 - DNA, 25 bp, Probe sequence
cagataacctgatctaccaagtggc

SEQ ID NO: 279781 - DNA, 25 bp, Probe sequence
cagaaccaggttcttgcgcgtctat

SEQ ID NO: 279782 - DNA, 25 bp, Probe sequence
cagatatttgaagctgaccgtcttt

SEQ ID NO: 279783 - DNA, 25 bp, Probe sequence
ctcctgtccatgtgaaggtgtggag

SEQ ID NO: 279784 - DNA, 25 bp, Probe sequence
cctgtcacattgccgactgatgaag

SEQ ID NO: 279785 - DNA, 25 bp, Probe sequence
gcggtcgacatttcagaaatcaagc

SEQ ID NO: 279786 - DNA, 25 bp, Probe sequence
gctttgattcagtcggaatggcgct

SEQ ID NO: 279787 - DNA, 25 bp, Probe sequence
gacagcatccttgaatatgtaaaag

SEQ ID NO: 279788 - DNA, 25 bp, Probe sequence
gtaaaggcagccgaggaatccaatg

SEQ ID NO: 279789 - DNA, 25 bp, Probe sequence
tgaccgtctttgaaagcgacaaatg

SEQ ID NO: 279790 - DNA, 25 bp, Probe sequence
tgctgttctctgtcactgttcccgg

SEQ ID NO: 279791 - DNA, 25 bp, Probe sequence
tgcgcgtctatcgcaggagtgctga

SEQ ID NO: 279792 - DNA, 25 bp, Probe sequence
tcggaatggcgctcagcagatattt

SEQ ID NO: 279793 - DNA, 25 bp, Probe sequence
tcagaaatcaagcctgtcacattgc

SEQ ID NO: 279794 - DNA, 25 bp, Probe sequence
tatcagctgatcgcccgtgtagaag

SEQ ID NO: 279795 - DNA, 25 bp, Probe sequence
atcaatagagacgatgtcacgtatt

SEQ ID NO: 279796 - DNA, 25 bp, Probe sequence
atgagacaaacttctcagcgtaaag

SEQ ID NO: 279797 - DNA, 25 bp, Probe sequence
atgttgacggctttgtgattgattc

SEQ ID NO: 279798 - DNA, 25 bp, Probe sequence
agctgacaggctgtgaaatatggaa

SEQ ID NO: 279799 - DNA, 25 bp, Probe sequence
acgatgtcacgtattgccaagagct

SEQ ID NO: 279800 - DNA, 25 bp, Probe sequence
ctcgacgtcattcagcttcacggtg

SEQ ID NO: 279801 - DNA, 25 bp, Probe sequence
gcgcttcaccatcaagataacacaa

SEQ ID NO: 279802 - DNA, 25 bp, Probe sequence
gcgagctgtacttatcggtgaatca

SEQ ID NO: 279803 - DNA, 25 bp, Probe sequence
gcggcggaatcacaggctgattacc

SEQ ID NO: 279804 - DNA, 25 bp, Probe sequence
gagcttgaagctcgacgtcattcag

SEQ ID NO: 279805 - DNA, 25 bp, Probe sequence
gtattgccaagagcttgaagctcga

SEQ ID NO: 279806 - DNA, 25 bp, Probe sequence
gtcactaaaggatttgcagcttgcg

SEQ ID NO: 279807 - DNA, 25 bp, Probe sequence
ggatgctgctgctcttcgcaagctg

SEQ ID NO: 279808 - DNA, 25 bp, Probe sequence
tgggaatgtgtgccggaatatcagc

SEQ ID NO: 279809 - DNA, 25 bp, Probe sequence
tgccggaatatcagcaggcggctat

SEQ ID NO: 279810 - DNA, 25 bp, Probe sequence
tctcagcgtaaagcaatccatgctt

SEQ ID NO: 279811 - DNA, 25 bp, Probe sequence
tttgcagcttgcggcggaatcacag

SEQ ID NO: 279812 - DNA, 25 bp, Probe sequence
ttaacatttgtcaatgaacatgggg

SEQ ID NO: 279813 - DNA, 25 bp, Probe sequence
ttcagcttcacggtgatgaaaaacc

SEQ ID NO: 279814 - DNA, 25 bp, Probe sequence
ttgattcatctgtaaaagggtctag

SEQ ID NO: 279815 - DNA, 25 bp, Probe sequence
acacgctcttacagtcgatggactt

SEQ ID NO: 279816 - DNA, 25 bp, Probe sequence
aagccggtgcgctgctgaaaacgat

SEQ ID NO: 279817 - DNA, 25 bp, Probe sequence
caatgcgggcacacgctcttacagt

SEQ ID NO: 279818 - DNA, 25 bp, Probe sequence
caatcgctctgtctcttctaaaagc

SEQ ID NO: 279819 - DNA, 25 bp, Probe sequence
cggtgttgcatcgatacaggcaggt

SEQ ID NO: 279820 - DNA, 25 bp, Probe sequence
cttgtattacgattcgcacgatgag

SEQ ID NO: 279821 - DNA, 25 bp, Probe sequence
cattgttgctgattctgttccggaa

SEQ ID NO: 279822 - DNA, 25 bp, Probe sequence
ctcggcaattgttgcctcggcagct

SEQ ID NO: 279823 - DNA, 25 bp, Probe sequence
ctgatgaacagatttctacaattgt

SEQ ID NO: 279824 - DNA, 25 bp, Probe sequence
cgctaagcatggcaatcgctctgtc

SEQ ID NO: 279825 - DNA, 25 bp, Probe sequence
tactgccggtgaggctgaaacgctg

SEQ ID NO: 279826 - DNA, 25 bp, Probe sequence
gaaaacgattcatattgcagaagac

SEQ ID NO: 279827 - DNA, 25 bp, Probe sequence
gatattgtcaattcttgctcatcgg

SEQ ID NO: 279828 - DNA, 25 bp, Probe sequence
gattcgcacgatgagtgtaaagaac

SEQ ID NO: 279829 - DNA, 25 bp, Probe sequence
gttgcctcggcagctggtgcgaaaa

SEQ ID NO: 279830 - DNA, 25 bp, Probe sequence
gttttgtgaaggcaatgcgggcaca

SEQ ID NO: 279831 - DNA, 25 bp, Probe sequence
tggacttcctgatattgttgataca

SEQ ID NO: 279832 - DNA, 25 bp, Probe sequence
tacaggcaggtgctggcattgttgc

SEQ ID NO: 279833 - DNA, 25 bp, Probe sequence
tatgatgatggcagcggaaatgact

SEQ ID NO: 279834 - DNA, 25 bp, Probe sequence
tatctcaacggcctcggcaattgtt

SEQ ID NO: 279835 - DNA, 25 bp, Probe sequence
atagactatgaggctgcgaaggcag

SEQ ID NO: 279836 - DNA, 25 bp, Probe sequence
agacgattacaagcggaggcgctgc

SEQ ID NO: 279837 - DNA, 25 bp, Probe sequence
actatgaggctgcgaaggcagatgc

SEQ ID NO: 279838 - DNA, 25 bp, Probe sequence
aagagagcgcctatctcattcagaa

SEQ ID NO: 279839 - DNA, 25 bp, Probe sequence
caccgaaagagagcgcctatctcat

SEQ ID NO: 279840 - DNA, 25 bp, Probe sequence
ccgcgcagcttgaacgactaaagca

SEQ ID NO: 279841 - DNA, 25 bp, Probe sequence
gcttttaatgcgggagctgcgattt

SEQ ID NO: 279842 - DNA, 25 bp, Probe sequence
gcagcagttccgctttatctattac

SEQ ID NO: 279843 - DNA, 25 bp, Probe sequence
gcagattgcaatagactatgaggct

SEQ ID NO: 279844 - DNA, 25 bp, Probe sequence
gcagcttgaacgactaaagcagaaa

SEQ ID NO: 279845 - DNA, 25 bp, Probe sequence
gagcgcctatctcattcagaatatt

SEQ ID NO: 279846 - DNA, 25 bp, Probe sequence
gagcagcctttcgagaaacgttcat

SEQ ID NO: 279847 - DNA, 25 bp, Probe sequence
gaggcgctggcaagcccgaatcggt

SEQ ID NO: 279848 - DNA, 25 bp, Probe sequence
gatttcggtttcacaaatggcagac

SEQ ID NO: 279849 - DNA, 25 bp, Probe sequence
gattacaagcggaggcgctgccgcg

SEQ ID NO: 279850 - DNA, 25 bp, Probe sequence
tttacaggtgcagtcaccgaaagag

SEQ ID NO: 279851 - DNA, 25 bp, Probe sequence
tttcacaaatggcagacttgaagat

SEQ ID NO: 279852 - DNA, 25 bp, Probe sequence
ttttgtgcctgtgcagattgcaata

SEQ ID NO: 279853 - DNA, 25 bp, Probe sequence
ttagagacgattacaagcggaggcg

SEQ ID NO: 279854 - DNA, 25 bp, Probe sequence
ttaaagaggattttgtgcctgtgca

SEQ ID NO: 279855 - DNA, 25 bp, Probe sequence
atctcggatacaatagaggcaaaga

SEQ ID NO: 279856 - DNA, 25 bp, Probe sequence
aagaattcagctaacgcttccagac

SEQ ID NO: 279857 - DNA, 25 bp, Probe sequence
caattcggtcaattgtcactgtcat

SEQ ID NO: 279858 - DNA, 25 bp, Probe sequence
gctgaagcagcccgcatattaggcg

SEQ ID NO: 279859 - DNA, 25 bp, Probe sequence
gaagcgatcttttccgccggaatcc

SEQ ID NO: 279860 - DNA, 25 bp, Probe sequence
gatttgacagaagcggaactctctt

SEQ ID NO: 279861 - DNA, 25 bp, Probe sequence
gtacggtcagtttgcgtaaagaaga

SEQ ID NO: 279862 - DNA, 25 bp, Probe sequence
tcatcagccggattttgttattgat

SEQ ID NO: 279863 - DNA, 25 bp, Probe sequence
tatcccgtcaaaggattccgtttct

SEQ ID NO: 279864 - DNA, 25 bp, Probe sequence
ttcatcagccggattttgttattga

SEQ ID NO: 279865 - DNA, 25 bp, Probe sequence
ttccggcgcataaagtcagcaaggt

SEQ ID NO: 279866 - DNA, 25 bp, Probe sequence
attatctgatgtgatgcctgttgag

SEQ ID NO: 279867 - DNA, 25 bp, Probe sequence
acaccacattttgaccttgtagggg

SEQ ID NO: 279868 - DNA, 25 bp, Probe sequence
acaaccggtttctcagaagctgatt

SEQ ID NO: 279869 - DNA, 25 bp, Probe sequence
acaaccggatgtcttgattgattta

SEQ ID NO: 279870 - DNA, 25 bp, Probe sequence
ctcggtgcgatactgatgatgaaat

SEQ ID NO: 279871 - DNA, 25 bp, Probe sequence
ccaaattttgcgctcggtgcgatac

SEQ ID NO: 279872 - DNA, 25 bp, Probe sequence
gaaaaagggatcggagccatcatcg

SEQ ID NO: 279873 - DNA, 25 bp, Probe sequence
ggccatagaccatacatacgatcag

SEQ ID NO: 279874 - DNA, 25 bp, Probe sequence
tcttgattgatttaacaacgcccga

SEQ ID NO: 279875 - DNA, 25 bp, Probe sequence
tcatcatgaccagaagcttgacgca

SEQ ID NO: 279876 - DNA, 25 bp, Probe sequence
ttagagcacggagtccgtccagttg

SEQ ID NO: 279877 - DNA, 25 bp, Probe sequence
atgaaggtgttttcgaattccgtga

SEQ ID NO: 279878 - DNA, 25 bp, Probe sequence
aaagaatcatgatctatacgcaacc

SEQ ID NO: 279879 - DNA, 25 bp, Probe sequence
ctgcggaaattcttgtgcgcacact

SEQ ID NO: 279880 - DNA, 25 bp, Probe sequence
cccacagtgatgatgtcgagatcgg

SEQ ID NO: 279881 - DNA, 25 bp, Probe sequence
ccgaatgtataatgctgacgttctt

SEQ ID NO: 279882 - DNA, 25 bp, Probe sequence
ccgtttatgtgatgtgtattccatt

SEQ ID NO: 279883 - DNA, 25 bp, Probe sequence
gcggaaattcttgtgcgcacacttg

SEQ ID NO: 279884 - DNA, 25 bp, Probe sequence
gaaaattgctttgatcgcgcatgac

SEQ ID NO: 279885 - DNA, 25 bp, Probe sequence
gtcatttttttgcgcgacccgctga

SEQ ID NO: 279886 - DNA, 25 bp, Probe sequence
tgaaccggatgtctcggcattaatc

SEQ ID NO: 279887 - DNA, 25 bp, Probe sequence
tgaagattgatcagcttgtgtatgg

SEQ ID NO: 279888 - DNA, 25 bp, Probe sequence
atacggccggttttgtgttagcagc

SEQ ID NO: 279889 - DNA, 25 bp, Probe sequence
atgccactgaatacgttgaaaaaat

SEQ ID NO: 279890 - DNA, 25 bp, Probe sequence
cgggccgttctctcgtgggagacgc

SEQ ID NO: 279891 - DNA, 25 bp, Probe sequence
gaaccgggccgttctctcgtgggag

SEQ ID NO: 279892 - DNA, 25 bp, Probe sequence
gttttgtgttagcagcggaaaaaat

SEQ ID NO: 279893 - DNA, 25 bp, Probe sequence
gtgctgaatcttggaggaggtttcg

SEQ ID NO: 279894 - DNA, 25 bp, Probe sequence
ggccggttttgtgttagcagcggaa

SEQ ID NO: 279895 - DNA, 25 bp, Probe sequence
tcatgccactgaatacgttgaaaaa

SEQ ID NO: 279896 - DNA, 25 bp, Probe sequence
tattcatttgtatccaaggtgctga

SEQ ID NO: 279897 - DNA, 25 bp, Probe sequence
ttgtatccaaggtgctgaatcttgg

SEQ ID NO: 279898 - DNA, 25 bp, Probe sequence
ttcatttgtatccaaggtgctgaat

SEQ ID NO: 279899 - DNA, 25 bp, Probe sequence
atcagtcgcaatgattcagctcgct

SEQ ID NO: 279900 - DNA, 25 bp, Probe sequence
agcggagaaatatggtacacctctt

SEQ ID NO: 279901 - DNA, 25 bp, Probe sequence
cacctctttacgtatatgatgtggc

SEQ ID NO: 279902 - DNA, 25 bp, Probe sequence
gcaggcgtttatttctgcagggctg

SEQ ID NO: 279903 - DNA, 25 bp, Probe sequence
ggactttctttagatgtcgtatccg

SEQ ID NO: 279904 - DNA, 25 bp, Probe sequence
gagagctatatacggctgttgcagc

SEQ ID NO: 279905 - DNA, 25 bp, Probe sequence
ggatgctctctatttagcggagaaa

SEQ ID NO: 279906 - DNA, 25 bp, Probe sequence
ggagaaatatggtacacctctttac

SEQ ID NO: 279907 - DNA, 25 bp, Probe sequence
ggctttaatacgtgagcgtgctaaa

SEQ ID NO: 279908 - DNA, 25 bp, Probe sequence
tacacctctttacgtatatgatgtg

SEQ ID NO: 279909 - DNA, 25 bp, Probe sequence
tagaaatcggaggtgtggatgctct

SEQ ID NO: 279910 - DNA, 25 bp, Probe sequence
actgaacgggccattgaacaagtat

SEQ ID NO: 279911 - DNA, 25 bp, Probe sequence
agtttggtttcgatcttcataacgg

SEQ ID NO: 279912 - DNA, 25 bp, Probe sequence
cttcggatcacgcccggagtagaag

SEQ ID NO: 279913 - DNA, 25 bp, Probe sequence
ctgaacgggccattgaacaagtatt

SEQ ID NO: 279914 - DNA, 25 bp, Probe sequence
gactacattacaacgggccaggaag

SEQ ID NO: 279915 - DNA, 25 bp, Probe sequence
gcttcttgaagacctatgtaaagaa

SEQ ID NO: 279916 - DNA, 25 bp, Probe sequence
gaacgcatccactttcatggaaaca

SEQ ID NO: 279917 - DNA, 25 bp, Probe sequence
tgactacattacaacgggccaggaa

SEQ ID NO: 279918 - DNA, 25 bp, Probe sequence
tccattgccatatcggctcgcaaat

SEQ ID NO: 279919 - DNA, 25 bp, Probe sequence
tacgcatgactacattacaacgggc

SEQ ID NO: 279920 - DNA, 25 bp, Probe sequence
tttcgatcttcataacggacaaact

SEQ ID NO: 279921 - DNA, 25 bp, Probe sequence
atcggggtcattgccaatgatatgg

SEQ ID NO: 279922 - DNA, 25 bp, Probe sequence
atggtcatgctgccgcaggatgatc

SEQ ID NO: 279923 - DNA, 25 bp, Probe sequence
ctgtcaaaaattgagtcacgtccga

SEQ ID NO: 279924 - DNA, 25 bp, Probe sequence
ctgtctcccgatgaaaacatatctt

SEQ ID NO: 279925 - DNA, 25 bp, Probe sequence
cctgtcaaaaattgagtcacgtccg

SEQ ID NO: 279926 - DNA, 25 bp, Probe sequence
gagctctaggcccaaaacgacctta

SEQ ID NO: 279927 - DNA, 25 bp, Probe sequence
gaccatcccgagctgaatatcgggg

SEQ ID NO: 279928 - DNA, 25 bp, Probe sequence
gagtcacgtccgactaaaaccggat

SEQ ID NO: 279929 - DNA, 25 bp, Probe sequence
gtctgcattttcttggagaaattta

SEQ ID NO: 279930 - DNA, 25 bp, Probe sequence
tccggggcgctgcatagagtgctgt

SEQ ID NO: 279931 - DNA, 25 bp, Probe sequence
tcaaaaattgagtcacgtccgacta

SEQ ID NO: 279932 - DNA, 25 bp, Probe sequence
aggtcgatttaagtagaagtgcgtt

SEQ ID NO: 279933 - DNA, 25 bp, Probe sequence
ctggaagcaacgttctttccattca

SEQ ID NO: 279934 - DNA, 25 bp, Probe sequence
gcagatgccgttcaaaaggtcgatt

SEQ ID NO: 279935 - DNA, 25 bp, Probe sequence
gattcagtagcagatgccgttcaaa

SEQ ID NO: 279936 - DNA, 25 bp, Probe sequence
gtagctgattctggaagcaacgttc

SEQ ID NO: 279937 - DNA, 25 bp, Probe sequence
gtgacactgtctatcagtacgtcgg

SEQ ID NO: 279938 - DNA, 25 bp, Probe sequence
ggaggataggtcaggtgcgttatct

SEQ ID NO: 279939 - DNA, 25 bp, Probe sequence
tgacactgtctatcagtacgtcggc

SEQ ID NO: 279940 - DNA, 25 bp, Probe sequence
tatcagtacgtcggcaatggaagaa

SEQ ID NO: 279941 - DNA, 25 bp, Probe sequence
tttggaggataggtcaggtgcgtta

SEQ ID NO: 279942 - DNA, 25 bp, Probe sequence
ttttccattctacaccatggtaaaa

SEQ ID NO: 279943 - DNA, 25 bp, Probe sequence
atatgaatacgccaattctaccggg

SEQ ID NO: 279944 - DNA, 25 bp, Probe sequence
atttcttcatcgacattttccttcc

SEQ ID NO: 279945 - DNA, 25 bp, Probe sequence
aatcgtgggtgaaatgacgttgccg

SEQ ID NO: 279946 - DNA, 25 bp, Probe sequence
ctacatttacacatctagcagtcag

SEQ ID NO: 279947 - DNA, 25 bp, Probe sequence
ccgaacatgttgcttaccgcaccat

SEQ ID NO: 279948 - DNA, 25 bp, Probe sequence
gctcgacaaaatttactcacattca

SEQ ID NO: 279949 - DNA, 25 bp, Probe sequence
gaacatgttgcttaccgcaccattc

SEQ ID NO: 279950 - DNA, 25 bp, Probe sequence
gttgcaggcgaagttgattttgctt

SEQ ID NO: 279951 - DNA, 25 bp, Probe sequence
ggagtgtatagatgcagccgttgca

SEQ ID NO: 279952 - DNA, 25 bp, Probe sequence
tcggttatttaggtccagcagctac

SEQ ID NO: 279953 - DNA, 25 bp, Probe sequence
tacatttacacatctagcagtcagt

SEQ ID NO: 279954 - DNA, 25 bp, Probe sequence
atgcttgtgcctgagctgtcaaaag

SEQ ID NO: 279955 - DNA, 25 bp, Probe sequence
acgcgagagacgtgcttccgaagga

SEQ ID NO: 279956 - DNA, 25 bp, Probe sequence
aaagaacagctcgcgcttcatttcc

SEQ ID NO: 279957 - DNA, 25 bp, Probe sequence
gaaggagtttccatatgccgatgcc

SEQ ID NO: 279958 - DNA, 25 bp, Probe sequence
gaagggcgcatatggaacggctctc

SEQ ID NO: 279959 - DNA, 25 bp, Probe sequence
gaaggatatgttccatcagccgtac

SEQ ID NO: 279960 - DNA, 25 bp, Probe sequence
gacgagacccaaatgatccgcgtcc

SEQ ID NO: 279961 - DNA, 25 bp, Probe sequence
gacgtagtcgttgtcattccttttt

SEQ ID NO: 279962 - DNA, 25 bp, Probe sequence
gtgatcggcctgcatgaggatgacg

SEQ ID NO: 279963 - DNA, 25 bp, Probe sequence
ggattggccgcttgtcgggaaaatc

SEQ ID NO: 279964 - DNA, 25 bp, Probe sequence
tcctcattgctgcgatcatgtccaa

SEQ ID NO: 279965 - DNA, 25 bp, Probe sequence
agcgcctgatgttttagcgatcccg

SEQ ID NO: 279966 - DNA, 25 bp, Probe sequence
aactcgctcaagctgtcatgtacgg

SEQ ID NO: 279967 - DNA, 25 bp, Probe sequence
aaactgctgccttcgaagtgtgcga

SEQ ID NO: 279968 - DNA, 25 bp, Probe sequence
caggccttccgaaaatgcgcggctt

SEQ ID NO: 279969 - DNA, 25 bp, Probe sequence
gcatatgcagcccgtgctaacatga

SEQ ID NO: 279970 - DNA, 25 bp, Probe sequence
gacggaaactttgacgatgcgctta

SEQ ID NO: 279971 - DNA, 25 bp, Probe sequence
gaaatgcattgtcatcatcccgaac

SEQ ID NO: 279972 - DNA, 25 bp, Probe sequence
gatgcgcttaaaattgtccgttcca

SEQ ID NO: 279973 - DNA, 25 bp, Probe sequence
gtcaacccttaccgcattgaaggcc

SEQ ID NO: 279974 - DNA, 25 bp, Probe sequence
gtaacagatcaaacaccggcgctaa

SEQ ID NO: 279975 - DNA, 25 bp, Probe sequence
gtcaacaggtaacacttccgctgct

SEQ ID NO: 279976 - DNA, 25 bp, Probe sequence
agatccgaacacagcggtcgacatt

SEQ ID NO: 279977 - DNA, 25 bp, Probe sequence
aaatgcctcctgtccatgtgaaggt

SEQ ID NO: 279978 - DNA, 25 bp, Probe sequence
aaatcaagcctgtcacattgccgac

SEQ ID NO: 279979 - DNA, 25 bp, Probe sequence
tctgtcactgttcccggaagcacag

SEQ ID NO: 279980 - DNA, 25 bp, Probe sequence
gccccggctttgattcagtcggaat

SEQ ID NO: 279981 - DNA, 25 bp, Probe sequence
gaacgaagccgacatgctgttctct

SEQ ID NO: 279982 - DNA, 25 bp, Probe sequence
gataacctgatctaccaagtggcta

SEQ ID NO: 279983 - DNA, 25 bp, Probe sequence
gttcttgcgcgtctatcgcaggagt

SEQ ID NO: 279984 - DNA, 25 bp, Probe sequence
tgaaatccttcacgcatatcagctg

SEQ ID NO: 279985 - DNA, 25 bp, Probe sequence
tcagtcggaatggcgctcagcagat

SEQ ID NO: 279986 - DNA, 25 bp, Probe sequence
tatcagctgatcgcccgtgtagaag

SEQ ID NO: 279987 - DNA, 25 bp, Probe sequence
caacctcttacgtgcgcctttctgc

SEQ ID NO: 279988 - DNA, 25 bp, Probe sequence
agactcaggcgatgtgctttatggc

SEQ ID NO: 279989 - DNA, 25 bp, Probe sequence
actggggctaaatccgcagcaaact

SEQ ID NO: 279990 - DNA, 25 bp, Probe sequence
acaacagcaacgtcttgaacaggcg

SEQ ID NO: 279991 - DNA, 25 bp, Probe sequence
tgccaacctcttacgtgcgcctttc

SEQ ID NO: 279992 - DNA, 25 bp, Probe sequence
gcaaactcgattttctacggttgca

SEQ ID NO: 279993 - DNA, 25 bp, Probe sequence
gcaaactggggctaaatccgcagca

SEQ ID NO: 279994 - DNA, 25 bp, Probe sequence
gaacagactcaggcgatgtgcttta

SEQ ID NO: 279995 - DNA, 25 bp, Probe sequence
gggataacgaacaacagcaacgtct

SEQ ID NO: 279996 - DNA, 25 bp, Probe sequence
tatggcaggcgcaaactcgattttc

SEQ ID NO: 279997 - DNA, 25 bp, Probe sequence
tttctacggttgcaaactgctgacc

SEQ ID NO: 279998 - DNA, 25 bp, Probe sequence
aagccgagcggttgatggaagttga

SEQ ID NO: 279999 - DNA, 25 bp, Probe sequence
catttcgatcctcgtcaggtgcagg

SEQ ID NO: 280000 - DNA, 25 bp, Probe sequence
cggcaggatcgacgcgcttctgtat

SEQ ID NO: 280001 - DNA, 25 bp, Probe sequence
ctggatctgctgtttgaagcgcagc

SEQ ID NO: 280002 - DNA, 25 bp, Probe sequence
cgcgctacaaaaccgggctggaagc

SEQ ID NO: 280003 - DNA, 25 bp, Probe sequence
tcgatcctcgtcaggtgcaggtcag

SEQ ID NO: 280004 - DNA, 25 bp, Probe sequence
gctggatctgctgtttgaagcgcag

SEQ ID NO: 280005 - DNA, 25 bp, Probe sequence
gagcggttgatggaagttgaacagg

SEQ ID NO: 280006 - DNA, 25 bp, Probe sequence
tcgcgctacaaaaccgggctggaag

SEQ ID NO: 280007 - DNA, 25 bp, Probe sequence
ttcgatcctcgtcaggtgcaggtca

SEQ ID NO: 280008 - DNA, 25 bp, Probe sequence
tttcgatcctcgtcaggtgcaggtc

SEQ ID NO: 280009 - DNA, 25 bp, Probe sequence
agatcgcgccggattattgctgcaa

SEQ ID NO: 280010 - DNA, 25 bp, Probe sequence
aaaagatcgcgccggattattgctg

SEQ ID NO: 280011 - DNA, 25 bp, Probe sequence
cacgcacttatcaggaacgcctcga

SEQ ID NO: 280012 - DNA, 25 bp, Probe sequence
cgggatcaaagtctgttctggcggc

SEQ ID NO: 280013 - DNA, 25 bp, Probe sequence
cggaaagcgtgccaatcaacatgct

SEQ ID NO: 280014 - DNA, 25 bp, Probe sequence
ccggattattgctgcaactggcaaa

SEQ ID NO: 280015 - DNA, 25 bp, Probe sequence
ccgggatcaaagtctgttctggcgg

SEQ ID NO: 280016 - DNA, 25 bp, Probe sequence
gctgggcacgttgagtgaatctcag

SEQ ID NO: 280017 - DNA, 25 bp, Probe sequence
gcattgtgggcttaggcgaaacggt

SEQ ID NO: 280018 - DNA, 25 bp, Probe sequence
tgtatgacgctgggcacgttgagtg

SEQ ID NO: 280019 - DNA, 25 bp, Probe sequence
tgccgggatcaaagtctgttctggc

SEQ ID NO: 280020 - DNA, 25 bp, Probe sequence
atcaacatcatattcagcccatcac

SEQ ID NO: 280021 - DNA, 25 bp, Probe sequence
agtgccatgcgttcgctgaaaggca

SEQ ID NO: 280022 - DNA, 25 bp, Probe sequence
accgccagatgaaatcgaacagtcg

SEQ ID NO: 280023 - DNA, 25 bp, Probe sequence
cagcgattgcaactggcctggccgc

SEQ ID NO: 280024 - DNA, 25 bp, Probe sequence
cacgctgtggtttgatgatgcgctc

SEQ ID NO: 280025 - DNA, 25 bp, Probe sequence
cggtgccacgcatcttcatgaaggg

SEQ ID NO: 280026 - DNA, 25 bp, Probe sequence
cgctggtgcagggatcgttacccga

SEQ ID NO: 280027 - DNA, 25 bp, Probe sequence
gaacggcgtgcattatcaacatcat

SEQ ID NO: 280028 - DNA, 25 bp, Probe sequence
gtggacgagcgtccgcatgctaatc

SEQ ID NO: 280029 - DNA, 25 bp, Probe sequence
tcatattcagcccatcacgctgtgg

SEQ ID NO: 280030 - DNA, 25 bp, Probe sequence
tattaacgcgttcgcagttgcagcg

SEQ ID NO: 280031 - DNA, 25 bp, Probe sequence
aggatgccgcagaccattatctggc

SEQ ID NO: 280032 - DNA, 25 bp, Probe sequence
gtaaatacacccacgtactggacgc

SEQ ID NO: 280033 - DNA, 25 bp, Probe sequence
atgcagatctacagcgccagagtgc

SEQ ID NO: 280034 - DNA, 25 bp, Probe sequence
atggagcaatctcgcagtgcagtgg

SEQ ID NO: 280035 - DNA, 25 bp, Probe sequence
acgcgggttgtggacctggctggat

SEQ ID NO: 280036 - DNA, 25 bp, Probe sequence
acgttcgatcttgcatggagcaatc

SEQ ID NO: 280037 - DNA, 25 bp, Probe sequence
cacggcactccgcgagctgtatcgg

SEQ ID NO: 280038 - DNA, 25 bp, Probe sequence
cgccgccaatgcttgttcaggcacg

SEQ ID NO: 280039 - DNA, 25 bp, Probe sequence
ctgccgttagcgactgcgacgttcg

SEQ ID NO: 280040 - DNA, 25 bp, Probe sequence
ccagaaggatgccgcagaccattat

SEQ ID NO: 280041 - DNA, 25 bp, Probe sequence
gcatggagcaatctcgcagtgcagt

SEQ ID NO: 280042 - DNA, 25 bp, Probe sequence
aacaactgccggtgatactggtagt

SEQ ID NO: 280043 - DNA, 25 bp, Probe sequence
acttttgcagattgggtaacacagg

SEQ ID NO: 280044 - DNA, 25 bp, Probe sequence
acaacacgccggactgactctggcg

SEQ ID NO: 280045 - DNA, 25 bp, Probe sequence
aactcggctgtattaatcacgcgat

SEQ ID NO: 280046 - DNA, 25 bp, Probe sequence
cacaggtaatacaacacgccggact

SEQ ID NO: 280047 - DNA, 25 bp, Probe sequence
gccggtgatactggtagttggtgtg

SEQ ID NO: 280048 - DNA, 25 bp, Probe sequence
gtcacgctgaatatatgaccacgct

SEQ ID NO: 280049 - DNA, 25 bp, Probe sequence
tgacactttcacttttgcagattgg

SEQ ID NO: 280050 - DNA, 25 bp, Probe sequence
tgctgggagagatcccctggcttgc

SEQ ID NO: 280051 - DNA, 25 bp, Probe sequence
tcacgctgaatatatgaccacgctc

SEQ ID NO: 280052 - DNA, 25 bp, Probe sequence
ttctgacactttcacttttgcagat

SEQ ID NO: 280053 - DNA, 25 bp, Probe sequence
cttacaccttcgcagaacccacttc

SEQ ID NO: 280054 - DNA, 25 bp, Probe sequence
agcctgcagctggattacgcaacag

SEQ ID NO: 280055 - DNA, 25 bp, Probe sequence
acgcaacagtaaatccttacacctt

SEQ ID NO: 280056 - DNA, 25 bp, Probe sequence
gcagcaggctaccggacggcaggtt

SEQ ID NO: 280057 - DNA, 25 bp, Probe sequence
ctggcagcgaaaagaccccggaagg

SEQ ID NO: 280058 - DNA, 25 bp, Probe sequence
cgcaacagtaaatccttacaccttc

SEQ ID NO: 280059 - DNA, 25 bp, Probe sequence
cctctggcagcgaaaagaccccgga

SEQ ID NO: 280060 - DNA, 25 bp, Probe sequence
cctgcagctggattacgcaacagta

SEQ ID NO: 280061 - DNA, 25 bp, Probe sequence
gaatcattggtaatgagcgccggat

SEQ ID NO: 280062 - DNA, 25 bp, Probe sequence
gtaaatccttacaccttcgcagaac

SEQ ID NO: 280063 - DNA, 25 bp, Probe sequence
gggcagaccgatagaatcattggta

SEQ ID NO: 280064 - DNA, 25 bp, Probe sequence
ataactacctgttttgccgggtcag

SEQ ID NO: 280065 - DNA, 25 bp, Probe sequence
atgatccgaataactacctgttttg

SEQ ID NO: 280066 - DNA, 25 bp, Probe sequence
aaaaaatggtgttgccgcgccatct

SEQ ID NO: 280067 - DNA, 25 bp, Probe sequence
aacgaaaacgctggttagcaccgca

SEQ ID NO: 280068 - DNA, 25 bp, Probe sequence
aagatatctcacgtactgacggtgg

SEQ ID NO: 280069 - DNA, 25 bp, Probe sequence
ctgttttgccgggtcagaaaaaatg

SEQ ID NO: 280070 - DNA, 25 bp, Probe sequence
cgctggttagcaccgcaggtgtaga

SEQ ID NO: 280071 - DNA, 25 bp, Probe sequence
ccagctatcaactcgcgccctggaa

SEQ ID NO: 280072 - DNA, 25 bp, Probe sequence
gttaatccatattggcagaacgaaa

SEQ ID NO: 280073 - DNA, 25 bp, Probe sequence
ggtcgagcgatggatttccgtctct

SEQ ID NO: 280074 - DNA, 25 bp, Probe sequence
tagctgatgatccgaataactacct

SEQ ID NO: 280075 - DNA, 25 bp, Probe sequence
tctgtccgtttgccggtcgtgggcg

SEQ ID NO: 280076 - DNA, 25 bp, Probe sequence
atcgctgccaggatatacgtaatct

SEQ ID NO: 280077 - DNA, 25 bp, Probe sequence
cggaaatggtttcccgcagaacctg

SEQ ID NO: 280078 - DNA, 25 bp, Probe sequence
gccggtgaacgtgcaaaacaggctc

SEQ ID NO: 280079 - DNA, 25 bp, Probe sequence
gctgtttcactggttatgcggcgga

SEQ ID NO: 280080 - DNA, 25 bp, Probe sequence
gcactgatttcgaccaggttcgttc

SEQ ID NO: 280081 - DNA, 25 bp, Probe sequence
gcaaaacaggctctagcgttcgaac

SEQ ID NO: 280082 - DNA, 25 bp, Probe sequence
gatgttcgcgattatcttctatatc

SEQ ID NO: 280083 - DNA, 25 bp, Probe sequence
gatcgccaggcgttttctgagcata

SEQ ID NO: 280084 - DNA, 25 bp, Probe sequence
gggattgcttataacaccctgttac

SEQ ID NO: 280085 - DNA, 25 bp, Probe sequence
ttgggccagctaaacatgcttcatc

SEQ ID NO: 280086 - DNA, 25 bp, Probe sequence
agacctgcaactgttccgcaaactg

SEQ ID NO: 280087 - DNA, 25 bp, Probe sequence
atcatgatgccaacctcttacgtgc

SEQ ID NO: 280088 - DNA, 25 bp, Probe sequence
actgctgaccacgccgaatccggaa

SEQ ID NO: 280089 - DNA, 25 bp, Probe sequence
atgatgccaacctcttacgtgcgcc

SEQ ID NO: 280090 - DNA, 25 bp, Probe sequence
attcgcaccattgcggtcgcgcgga

SEQ ID NO: 280091 - DNA, 25 bp, Probe sequence
attgcggtcgcgcggatcatgatgc

SEQ ID NO: 280092 - DNA, 25 bp, Probe sequence
attttctacggttgcaaactgctga

SEQ ID NO: 280093 - DNA, 25 bp, Probe sequence
atattacaacgcggcagcattatga

SEQ ID NO: 280094 - DNA, 25 bp, Probe sequence
ataacgaacaacagcaacgtcttga

SEQ ID NO: 280095 - DNA, 25 bp, Probe sequence
atgcctttgattttattcgcaccat

SEQ ID NO: 280096 - DNA, 25 bp, Probe sequence
atgaacgaacagactcaggcgatgt

SEQ ID NO: 280097 - DNA, 25 bp, Probe sequence
caacctcttacgtgcgcctttctgc

SEQ ID NO: 280098 - DNA, 25 bp, Probe sequence
aactgctgaccacgccgaatccgga

SEQ ID NO: 280099 - DNA, 25 bp, Probe sequence
atgtgctttatggcaggcgcaaact

SEQ ID NO: 280100 - DNA, 25 bp, Probe sequence
aggcgatgtgctttatggcaggcgc

SEQ ID NO: 280101 - DNA, 25 bp, Probe sequence
agatgaacgaacagactcaggcgat

SEQ ID NO: 280102 - DNA, 25 bp, Probe sequence
catgatgccaacctcttacgtgcgc

SEQ ID NO: 280103 - DNA, 25 bp, Probe sequence
agactcaggcgatgtgctttatggc

SEQ ID NO: 280104 - DNA, 25 bp, Probe sequence
agcaacgtcttgaacaggcgctgat

SEQ ID NO: 280105 - DNA, 25 bp, Probe sequence
accattgcggtcgcgcggatcatga

SEQ ID NO: 280106 - DNA, 25 bp, Probe sequence
acgaacagactcaggcgatgtgctt

SEQ ID NO: 280107 - DNA, 25 bp, Probe sequence
acgtcttgaacaggcgctgatgacc

SEQ ID NO: 280108 - DNA, 25 bp, Probe sequence
acggttgcaaactgctgaccacgcc

SEQ ID NO: 280109 - DNA, 25 bp, Probe sequence
actcaggcgatgtgctttatggcag

SEQ ID NO: 280110 - DNA, 25 bp, Probe sequence
acagactcaggcgatgtgctttatg

SEQ ID NO: 280111 - DNA, 25 bp, Probe sequence
acagcaacgtcttgaacaggcgctg

SEQ ID NO: 280112 - DNA, 25 bp, Probe sequence
acaacagcaacgtcttgaacaggcg

SEQ ID NO: 280113 - DNA, 25 bp, Probe sequence
aaatccgcagcaaactgccgtgctg

SEQ ID NO: 280114 - DNA, 25 bp, Probe sequence
aacgaacagactcaggcgatgtgct

SEQ ID NO: 280115 - DNA, 25 bp, Probe sequence
aatccgcagcaaactgccgtgctgg

SEQ ID NO: 280116 - DNA, 25 bp, Probe sequence
aatattacaacgcggcagcattatg

SEQ ID NO: 280117 - DNA, 25 bp, Probe sequence
caacagcaacgtcttgaacaggcgc

SEQ ID NO: 280118 - DNA, 25 bp, Probe sequence
caacgtcttgaacaggcgctgatga

SEQ ID NO: 280119 - DNA, 25 bp, Probe sequence
caaactggggctaaatccgcagcaa

SEQ ID NO: 280120 - DNA, 25 bp, Probe sequence
caggcgctgatgaccccggacaccg

SEQ ID NO: 280121 - DNA, 25 bp, Probe sequence
caaactgctgaccacgccgaatccg

SEQ ID NO: 280122 - DNA, 25 bp, Probe sequence
caccgacgaatattacaacgcggca

SEQ ID NO: 280123 - DNA, 25 bp, Probe sequence
caggcgatgtgctttatggcaggcg

SEQ ID NO: 280124 - DNA, 25 bp, Probe sequence
cattgcggtcgcgcggatcatgatg

SEQ ID NO: 280125 - DNA, 25 bp, Probe sequence
ctttgattttattcgcaccattgcg

SEQ ID NO: 280126 - DNA, 25 bp, Probe sequence
ctgctgaccacgccgaatccggaag

SEQ ID NO: 280127 - DNA, 25 bp, Probe sequence
ctaaatccgcagcaaactgccgtgc

SEQ ID NO: 280128 - DNA, 25 bp, Probe sequence
cgtgcgcctttctgccggacgcgag

SEQ ID NO: 280129 - DNA, 25 bp, Probe sequence
ctgcaactgttccgcaaactggggc

SEQ ID NO: 280130 - DNA, 25 bp, Probe sequence
cggttgcaaactgctgaccacgccg

SEQ ID NO: 280131 - DNA, 25 bp, Probe sequence
ctcttacgtgcgcctttctgccgga

SEQ ID NO: 280132 - DNA, 25 bp, Probe sequence
cggatcatgatgccaacctcttacg

SEQ ID NO: 280133 - DNA, 25 bp, Probe sequence
ctggggctaaatccgcagcaaactg

SEQ ID NO: 280134 - DNA, 25 bp, Probe sequence
tccgcaaactggggctaaatccgca

SEQ ID NO: 280135 - DNA, 25 bp, Probe sequence
cgcaaactggggctaaatccgcagc

SEQ ID NO: 280136 - DNA, 25 bp, Probe sequence
cgacgaatattacaacgcggcagca

SEQ ID NO: 280137 - DNA, 25 bp, Probe sequence
gcgctgatgaccccggacaccgacg

SEQ ID NO: 280138 - DNA, 25 bp, Probe sequence
cgctgatgaccccggacaccgacga

SEQ ID NO: 280139 - DNA, 25 bp, Probe sequence
cgaatattacaacgcggcagcatta

SEQ ID NO: 280140 - DNA, 25 bp, Probe sequence
cgaacaacagcaacgtcttgaacag

SEQ ID NO: 280141 - DNA, 25 bp, Probe sequence
gttgcaaactgctgaccacgccgaa

SEQ ID NO: 280142 - DNA, 25 bp, Probe sequence
ccgcagcaaactgccgtgctggcag

SEQ ID NO: 280143 - DNA, 25 bp, Probe sequence
ccgacgaatattacaacgcggcagc

SEQ ID NO: 280144 - DNA, 25 bp, Probe sequence
cctttctgccggacgcgagcagatg

SEQ ID NO: 280145 - DNA, 25 bp, Probe sequence
gccggacgcgagcagatgaacgaac

SEQ ID NO: 280146 - DNA, 25 bp, Probe sequence
gcgcggatcatgatgccaacctctt

SEQ ID NO: 280147 - DNA, 25 bp, Probe sequence
gcgcctttctgccggacgcgagcag

SEQ ID NO: 280148 - DNA, 25 bp, Probe sequence
gctgaccacgccgaatccggaagaa

SEQ ID NO: 280149 - DNA, 25 bp, Probe sequence
gcgatgtgctttatggcaggcgcaa

SEQ ID NO: 280150 - DNA, 25 bp, Probe sequence
gcggtcgcgcggatcatgatgccaa

SEQ ID NO: 280151 - DNA, 25 bp, Probe sequence
tcttacgtgcgcctttctgccggac

SEQ ID NO: 280152 - DNA, 25 bp, Probe sequence
gcaggcgcaaactcgattttctacg

SEQ ID NO: 280153 - DNA, 25 bp, Probe sequence
gcagcaaactgccgtgctggcaggg

SEQ ID NO: 280154 - DNA, 25 bp, Probe sequence
gcaccattgcggtcgcgcggatcat

SEQ ID NO: 280155 - DNA, 25 bp, Probe sequence
gcaactgttccgcaaactggggcta

SEQ ID NO: 280156 - DNA, 25 bp, Probe sequence
gcaacgtcttgaacaggcgctgatg

SEQ ID NO: 280157 - DNA, 25 bp, Probe sequence
gaacgaacagactcaggcgatgtgc

SEQ ID NO: 280158 - DNA, 25 bp, Probe sequence
gaacagactcaggcgatgtgcttta

SEQ ID NO: 280159 - DNA, 25 bp, Probe sequence
gacgaatattacaacgcggcagcat

SEQ ID NO: 280160 - DNA, 25 bp, Probe sequence
gatgtcgatgcctttgattttattc

SEQ ID NO: 280161 - DNA, 25 bp, Probe sequence
gatgcctttgattttattcgcacca

SEQ ID NO: 280162 - DNA, 25 bp, Probe sequence
gataaagacctgcaactgttccgca

SEQ ID NO: 280163 - DNA, 25 bp, Probe sequence
gattttattcgcaccattgcggtcg

SEQ ID NO: 280164 - DNA, 25 bp, Probe sequence
gtcgatgcctttgattttattcgca

SEQ ID NO: 280165 - DNA, 25 bp, Probe sequence
gtcgcgcggatcatgatgccaacct

SEQ ID NO: 280166 - DNA, 25 bp, Probe sequence
ggggctaaatccgcagcaaactgcc

SEQ ID NO: 280167 - DNA, 25 bp, Probe sequence
ggtcgcgcggatcatgatgccaacc

SEQ ID NO: 280168 - DNA, 25 bp, Probe sequence
ggcaggcgcaaactcgattttctac

SEQ ID NO: 280169 - DNA, 25 bp, Probe sequence
ggatcatgatgccaacctcttacgt

SEQ ID NO: 280170 - DNA, 25 bp, Probe sequence
ggacgcgagcagatgaacgaacaga

SEQ ID NO: 280171 - DNA, 25 bp, Probe sequence
ggcgctgatgaccccggacaccgac

SEQ ID NO: 280172 - DNA, 25 bp, Probe sequence
ggctaaatccgcagcaaactgccgt

SEQ ID NO: 280173 - DNA, 25 bp, Probe sequence
tgcgcctttctgccggacgcgagca

SEQ ID NO: 280174 - DNA, 25 bp, Probe sequence
tgatgccaacctcttacgtgcgcct

SEQ ID NO: 280175 - DNA, 25 bp, Probe sequence
tgaccacgccgaatccggaagaaga

SEQ ID NO: 280176 - DNA, 25 bp, Probe sequence
tacgtgcgcctttctgccggacgcg

SEQ ID NO: 280177 - DNA, 25 bp, Probe sequence
tgcaactgttccgcaaactggggct

SEQ ID NO: 280178 - DNA, 25 bp, Probe sequence
tgctttatggcaggcgcaaactcga

SEQ ID NO: 280179 - DNA, 25 bp, Probe sequence
tgcaaactgctgaccacgccgaatc

SEQ ID NO: 280180 - DNA, 25 bp, Probe sequence
tctgccggacgcgagcagatgaacg

SEQ ID NO: 280181 - DNA, 25 bp, Probe sequence
tcgcgcggatcatgatgccaacctc

SEQ ID NO: 280182 - DNA, 25 bp, Probe sequence
tgccggacgcgagcagatgaacgaa

SEQ ID NO: 280183 - DNA, 25 bp, Probe sequence
tcgcaccattgcggtcgcgcggatc

SEQ ID NO: 280184 - DNA, 25 bp, Probe sequence
tctacggttgcaaactgctgaccac

SEQ ID NO: 280185 - DNA, 25 bp, Probe sequence
tcaggcgatgtgctttatggcaggc

SEQ ID NO: 280186 - DNA, 25 bp, Probe sequence
taacgaacaacagcaacgtcttgaa

SEQ ID NO: 280187 - DNA, 25 bp, Probe sequence
tacggttgcaaactgctgaccacgc

SEQ ID NO: 280188 - DNA, 25 bp, Probe sequence
tttgattttattcgcaccattgcgg

SEQ ID NO: 280189 - DNA, 25 bp, Probe sequence
tttctacggttgcaaactgctgacc

SEQ ID NO: 280190 - DNA, 25 bp, Probe sequence
ttttattcgcaccattgcggtcgcg

SEQ ID NO: 280191 - DNA, 25 bp, Probe sequence
tttattcgcaccattgcggtcgcgc

SEQ ID NO: 280192 - DNA, 25 bp, Probe sequence
ttttctacggttgcaaactgctgac

SEQ ID NO: 280193 - DNA, 25 bp, Probe sequence
ttgcggtcgcgcggatcatgatgcc

SEQ ID NO: 280194 - DNA, 25 bp, Probe sequence
ttcgcaccattgcggtcgcgcggat

SEQ ID NO: 280195 - DNA, 25 bp, Probe sequence
ttgattttattcgcaccattgcggt

SEQ ID NO: 280196 - DNA, 25 bp, Probe sequence
attgtcgcaagtcacagaattattt

SEQ ID NO: 280197 - DNA, 25 bp, Probe sequence
attgcaaatactgcccgcaaagctc

SEQ ID NO: 280198 - DNA, 25 bp, Probe sequence
atttcgatcctcgtcaggtgcaggt

SEQ ID NO: 280199 - DNA, 25 bp, Probe sequence
atcctcgtcaggtgcaggtcagcac

SEQ ID NO: 280200 - DNA, 25 bp, Probe sequence
atcgacgcgcttctgtatgggcgcg

SEQ ID NO: 280201 - DNA, 25 bp, Probe sequence
atcgccagcatttcgatcctcgtca

SEQ ID NO: 280202 - DNA, 25 bp, Probe sequence
aggatcgacgcgcttctgtatgggc

SEQ ID NO: 280203 - DNA, 25 bp, Probe sequence
aggtcagcacgttgctgtcgattaa

SEQ ID NO: 280204 - DNA, 25 bp, Probe sequence
aggtgcatcgccagcatttcgatcc

SEQ ID NO: 280205 - DNA, 25 bp, Probe sequence
aggtgcaggtcagcacgttgctgtc

SEQ ID NO: 280206 - DNA, 25 bp, Probe sequence
agattgcaaatactgcccgcaaagc

SEQ ID NO: 280207 - DNA, 25 bp, Probe sequence
agcgaaagcggcaggatcgacgcgc

SEQ ID NO: 280208 - DNA, 25 bp, Probe sequence
agcacgttgctgtcgattaagaccg

SEQ ID NO: 280209 - DNA, 25 bp, Probe sequence
agcatttcgatcctcgtcaggtgca

SEQ ID NO: 280210 - DNA, 25 bp, Probe sequence
agcggcaggatcgacgcgcttctgt

SEQ ID NO: 280211 - DNA, 25 bp, Probe sequence
accgttgctggatctgctgtttgaa

SEQ ID NO: 280212 - DNA, 25 bp, Probe sequence
aaaccgttgctggatctgctgtttg

SEQ ID NO: 280213 - DNA, 25 bp, Probe sequence
aagcggcaggatcgacgcgcttctg

SEQ ID NO: 280214 - DNA, 25 bp, Probe sequence
aagcgcagcaggtgcatcgccagca

SEQ ID NO: 280215 - DNA, 25 bp, Probe sequence
aagccgagcggttgatggaagttga

SEQ ID NO: 280216 - DNA, 25 bp, Probe sequence
aagcgaaagcggcaggatcgacgcg

SEQ ID NO: 280217 - DNA, 25 bp, Probe sequence
aagttgaacaggtgctggagtcggc

SEQ ID NO: 280218 - DNA, 25 bp, Probe sequence
aagattgcaaatactgcccgcaaag

SEQ ID NO: 280219 - DNA, 25 bp, Probe sequence
aatactgcccgcaaagctcgcgcta

SEQ ID NO: 280220 - DNA, 25 bp, Probe sequence
caaagcgaaagcggcaggatcgacg

SEQ ID NO: 280221 - DNA, 25 bp, Probe sequence
caaatactgcccgcaaagctcgcgc

SEQ ID NO: 280222 - DNA, 25 bp, Probe sequence
cacgttgctgtcgattaagaccgga

SEQ ID NO: 280223 - DNA, 25 bp, Probe sequence
cagcacgttgctgtcgattaagacc

SEQ ID NO: 280224 - DNA, 25 bp, Probe sequence
cacgctggacattgtcgcaagtcac

SEQ ID NO: 280225 - DNA, 25 bp, Probe sequence
cagcaggtgcatcgccagcatttcg

SEQ ID NO: 280226 - DNA, 25 bp, Probe sequence
caggtgcaggtcagcacgttgctgt

SEQ ID NO: 280227 - DNA, 25 bp, Probe sequence
caggatcgacgcgcttctgtatggg

SEQ ID NO: 280228 - DNA, 25 bp, Probe sequence
caggtcagcacgttgctgtcgatta

SEQ ID NO: 280229 - DNA, 25 bp, Probe sequence
ctggagtcggcgcgcaaagcgaaag

SEQ ID NO: 280230 - DNA, 25 bp, Probe sequence
ctgctgtttgaagcgcagcaggtgc

SEQ ID NO: 280231 - DNA, 25 bp, Probe sequence
cattgtcgcaagtcacagaattatt

SEQ ID NO: 280232 - DNA, 25 bp, Probe sequence
cttgtccggaagattgcaaatactg

SEQ ID NO: 280233 - DNA, 25 bp, Probe sequence
ctcgtcaggtgcaggtcagcacgtt

SEQ ID NO: 280234 - DNA, 25 bp, Probe sequence
ctgtttgaagcgcagcaggtgcatc

SEQ ID NO: 280235 - DNA, 25 bp, Probe sequence
cggcaggatcgacgcgcttctgtat

SEQ ID NO: 280236 - DNA, 25 bp, Probe sequence
cggagcttgtccggaagattgcaaa

SEQ ID NO: 280237 - DNA, 25 bp, Probe sequence
cgttgctgtcgattaagaccggagc

SEQ ID NO: 280238 - DNA, 25 bp, Probe sequence
cgttgctggatctgctgtttgaagc

SEQ ID NO: 280239 - DNA, 25 bp, Probe sequence
cgatcctcgtcaggtgcaggtcagc

SEQ ID NO: 280240 - DNA, 25 bp, Probe sequence
cgaaagcggcaggatcgacgcgctt

SEQ ID NO: 280241 - DNA, 25 bp, Probe sequence
cgagcggttgatggaagttgaacag

SEQ ID NO: 280242 - DNA, 25 bp, Probe sequence
cgcagcaggtgcatcgccagcattt

SEQ ID NO: 280243 - DNA, 25 bp, Probe sequence
cgcaaagcgaaagcggcaggatcga

SEQ ID NO: 280244 - DNA, 25 bp, Probe sequence
cgcaagtcacagaattatttgaaaa

SEQ ID NO: 280245 - DNA, 25 bp, Probe sequence
cgcgcaaagcgaaagcggcaggatc

SEQ ID NO: 280246 - DNA, 25 bp, Probe sequence
gctgtcgattaagaccggagcttgt

SEQ ID NO: 280247 - DNA, 25 bp, Probe sequence
cccacgctggacattgtcgcaagtc

SEQ ID NO: 280248 - DNA, 25 bp, Probe sequence
cgcccacgctggacattgtcgcaag

SEQ ID NO: 280249 - DNA, 25 bp, Probe sequence
ccggagcttgtccggaagattgcaa

SEQ ID NO: 280250 - DNA, 25 bp, Probe sequence
cctcgtcaggtgcaggtcagcacgt

SEQ ID NO: 280251 - DNA, 25 bp, Probe sequence
ccgttgctggatctgctgtttgaag

SEQ ID NO: 280252 - DNA, 25 bp, Probe sequence
tcgatcctcgtcaggtgcaggtcag

SEQ ID NO: 280253 - DNA, 25 bp, Probe sequence
gccagcatttcgatcctcgtcaggt

SEQ ID NO: 280254 - DNA, 25 bp, Probe sequence
ccagcatttcgatcctcgtcaggtg

SEQ ID NO: 280255 - DNA, 25 bp, Probe sequence
gcccacgctggacattgtcgcaagt

SEQ ID NO: 280256 - DNA, 25 bp, Probe sequence
gcccgcaaagctcgcgctacaaaac

SEQ ID NO: 280257 - DNA, 25 bp, Probe sequence
gcaaagcgaaagcggcaggatcgac

SEQ ID NO: 280258 - DNA, 25 bp, Probe sequence
gctggatctgctgtttgaagcgcag

SEQ ID NO: 280259 - DNA, 25 bp, Probe sequence
gctgtttgaagcgcagcaggtgcat

SEQ ID NO: 280260 - DNA, 25 bp, Probe sequence
gcatttcgatcctcgtcaggtgcag

SEQ ID NO: 280261 - DNA, 25 bp, Probe sequence
gcatcgccagcatttcgatcctcgt

SEQ ID NO: 280262 - DNA, 25 bp, Probe sequence
gcaggatcgacgcgcttctgtatgg

SEQ ID NO: 280263 - DNA, 25 bp, Probe sequence
gcaggtcagcacgttgctgtcgatt

SEQ ID NO: 280264 - DNA, 25 bp, Probe sequence
gatcgacgcgcttctgtatgggcgc

SEQ ID NO: 280265 - DNA, 25 bp, Probe sequence
gcaggtgcatcgccagcatttcgat

SEQ ID NO: 280266 - DNA, 25 bp, Probe sequence
gcaaatactgcccgcaaagctcgcg

SEQ ID NO: 280267 - DNA, 25 bp, Probe sequence
gaatccccacgaacgcgatatgccg

SEQ ID NO: 280268 - DNA, 25 bp, Probe sequence
gaccggagcttgtccggaagattgc

SEQ ID NO: 280269 - DNA, 25 bp, Probe sequence
gacattgtcgcaagtcacagaatta

SEQ ID NO: 280270 - DNA, 25 bp, Probe sequence
gagcttgtccggaagattgcaaata

SEQ ID NO: 280271 - DNA, 25 bp, Probe sequence
gatcctcgtcaggtgcaggtcagca

SEQ ID NO: 280272 - DNA, 25 bp, Probe sequence
gattgcaaatactgcccgcaaagct

SEQ ID NO: 280273 - DNA, 25 bp, Probe sequence
gttgctggatctgctgtttgaagcg

SEQ ID NO: 280274 - DNA, 25 bp, Probe sequence
gttgctgtcgattaagaccggagct

SEQ ID NO: 280275 - DNA, 25 bp, Probe sequence
gtttgaagcgcagcaggtgcatcgc

SEQ ID NO: 280276 - DNA, 25 bp, Probe sequence
gtgcatcgccagcatttcgatcctc

SEQ ID NO: 280277 - DNA, 25 bp, Probe sequence
gtcgcaagtcacagaattatttgaa

SEQ ID NO: 280278 - DNA, 25 bp, Probe sequence
ggtgcatcgccagcatttcgatcct

SEQ ID NO: 280279 - DNA, 25 bp, Probe sequence
ggtgcaggtcagcacgttgctgtcg

SEQ ID NO: 280280 - DNA, 25 bp, Probe sequence
ggatctgctgtttgaagcgcagcag

SEQ ID NO: 280281 - DNA, 25 bp, Probe sequence
ggagcttgtccggaagattgcaaat

SEQ ID NO: 280282 - DNA, 25 bp, Probe sequence
ggacattgtcgcaagtcacagaatt

SEQ ID NO: 280283 - DNA, 25 bp, Probe sequence
ggcaggatcgacgcgcttctgtatg

SEQ ID NO: 280284 - DNA, 25 bp, Probe sequence
tggatctgctgtttgaagcgcagca

SEQ ID NO: 280285 - DNA, 25 bp, Probe sequence
tgtcgattaagaccggagcttgtcc

SEQ ID NO: 280286 - DNA, 25 bp, Probe sequence
tggaagaatccccacgaacgcgata

SEQ ID NO: 280287 - DNA, 25 bp, Probe sequence
tggagtcggcgcgcaaagcgaaagc

SEQ ID NO: 280288 - DNA, 25 bp, Probe sequence
tgtcgcaagtcacagaattatttga

SEQ ID NO: 280289 - DNA, 25 bp, Probe sequence
tgtttgaagcgcagcaggtgcatcg

SEQ ID NO: 280290 - DNA, 25 bp, Probe sequence
tgcatcgccagcatttcgatcctcg

SEQ ID NO: 280291 - DNA, 25 bp, Probe sequence
tgcaggtcagcacgttgctgtcgat

SEQ ID NO: 280292 - DNA, 25 bp, Probe sequence
tgctgtcgattaagaccggagcttg

SEQ ID NO: 280293 - DNA, 25 bp, Probe sequence
tgctggagtcggcgcgcaaagcgaa

SEQ ID NO: 280294 - DNA, 25 bp, Probe sequence
tcgccagcatttcgatcctcgtcag

SEQ ID NO: 280295 - DNA, 25 bp, Probe sequence
tgctggatctgctgtttgaagcgca

SEQ ID NO: 280296 - DNA, 25 bp, Probe sequence
tgcccgcaaagctcgcgctacaaaa

SEQ ID NO: 280297 - DNA, 25 bp, Probe sequence
tcgtcaggtgcaggtcagcacgttg

SEQ ID NO: 280298 - DNA, 25 bp, Probe sequence
tcggcgcgcaaagcgaaagcggcag

SEQ ID NO: 280299 - DNA, 25 bp, Probe sequence
tctgctgtttgaagcgcagcaggtg

SEQ ID NO: 280300 - DNA, 25 bp, Probe sequence
tcaggtgcaggtcagcacgttgctg

SEQ ID NO: 280301 - DNA, 25 bp, Probe sequence
tcagcacgttgctgtcgattaagac

SEQ ID NO: 280302 - DNA, 25 bp, Probe sequence
tactgcccgcaaagctcgcgctaca

SEQ ID NO: 280303 - DNA, 25 bp, Probe sequence
tttgaaaaaccgttgctggatctgc

SEQ ID NO: 280304 - DNA, 25 bp, Probe sequence
tttcgatcctcgtcaggtgcaggtc

SEQ ID NO: 280305 - DNA, 25 bp, Probe sequence
ttgctgtcgattaagaccggagctt

SEQ ID NO: 280306 - DNA, 25 bp, Probe sequence
cgccgccggaaagcgtgccaatcaa

SEQ ID NO: 280307 - DNA, 25 bp, Probe sequence
agcgcctcgcgaacgccgggctgga

SEQ ID NO: 280308 - DNA, 25 bp, Probe sequence
agtgaatctcaggcgcagcgcctcg

SEQ ID NO: 280309 - DNA, 25 bp, Probe sequence
attgctgcaactggcaaacctgccg

SEQ ID NO: 280310 - DNA, 25 bp, Probe sequence
attattgctgcaactggcaaacctg

SEQ ID NO: 280311 - DNA, 25 bp, Probe sequence
ctgcaactggcaaacctgccgacgc

SEQ ID NO: 280312 - DNA, 25 bp, Probe sequence
atcaaagtctgttctggcggcattg

SEQ ID NO: 280313 - DNA, 25 bp, Probe sequence
atcaggaacgcctcgatacgctgga

SEQ ID NO: 280314 - DNA, 25 bp, Probe sequence
atcgcgccggattattgctgcaact

SEQ ID NO: 280315 - DNA, 25 bp, Probe sequence
atgccgggatcaaagtctgttctgg

SEQ ID NO: 280316 - DNA, 25 bp, Probe sequence
aggcgtgtatgacgctgggcacgtt

SEQ ID NO: 280317 - DNA, 25 bp, Probe sequence
agtgcgcgatgccgggatcaaagtc

SEQ ID NO: 280318 - DNA, 25 bp, Probe sequence
agtctgttctggcggcattgtgggc

SEQ ID NO: 280319 - DNA, 25 bp, Probe sequence
agatcgcgccggattattgctgcaa

SEQ ID NO: 280320 - DNA, 25 bp, Probe sequence
agcgtgccaatcaacatgctggtga

SEQ ID NO: 280321 - DNA, 25 bp, Probe sequence
accacacgcacttatcaggaacgcc

SEQ ID NO: 280322 - DNA, 25 bp, Probe sequence
acgcacttatcaggaacgcctcgat

SEQ ID NO: 280323 - DNA, 25 bp, Probe sequence
acgctgggcacgttgagtgaatctc

SEQ ID NO: 280324 - DNA, 25 bp, Probe sequence
acggcaatatcatcaccacacgcac

SEQ ID NO: 280325 - DNA, 25 bp, Probe sequence
acttatcaggaacgcctcgatacgc

SEQ ID NO: 280326 - DNA, 25 bp, Probe sequence
aaagtgcgcgatgccgggatcaaag

SEQ ID NO: 280327 - DNA, 25 bp, Probe sequence
aaagcgtgccaatcaacatgctggt

SEQ ID NO: 280328 - DNA, 25 bp, Probe sequence
aagatcgcgccggattattgctgca

SEQ ID NO: 280329 - DNA, 25 bp, Probe sequence
aagtgcgcgatgccgggatcaaagt

SEQ ID NO: 280330 - DNA, 25 bp, Probe sequence
aagtctgttctggcggcattgtggg

SEQ ID NO: 280331 - DNA, 25 bp, Probe sequence
aatctcaggcgcagcgcctcgcgaa

SEQ ID NO: 280332 - DNA, 25 bp, Probe sequence
aatcaacatgctggtgaaggtgaaa

SEQ ID NO: 280333 - DNA, 25 bp, Probe sequence
caatcaacatgctggtgaaggtgaa

SEQ ID NO: 280334 - DNA, 25 bp, Probe sequence
caatatcatcaccacacgcacttat

SEQ ID NO: 280335 - DNA, 25 bp, Probe sequence
caacatgctggtgaaggtgaaaggc

SEQ ID NO: 280336 - DNA, 25 bp, Probe sequence
gcaactggcaaacctgccgacgccg

SEQ ID NO: 280337 - DNA, 25 bp, Probe sequence
caaagtctgttctggcggcattgtg

SEQ ID NO: 280338 - DNA, 25 bp, Probe sequence
cacacgcacttatcaggaacgcctc

SEQ ID NO: 280339 - DNA, 25 bp, Probe sequence
caccacacgcacttatcaggaacgc

SEQ ID NO: 280340 - DNA, 25 bp, Probe sequence
cacgcacttatcaggaacgcctcga

SEQ ID NO: 280341 - DNA, 25 bp, Probe sequence
cgtgtatgacgctgggcacgttgag

SEQ ID NO: 280342 - DNA, 25 bp, Probe sequence
cggcaatatcatcaccacacgcact

SEQ ID NO: 280343 - DNA, 25 bp, Probe sequence
cgatgccgggatcaaagtctgttct

SEQ ID NO: 280344 - DNA, 25 bp, Probe sequence
cttatcaggaacgcctcgatacgct

SEQ ID NO: 280345 - DNA, 25 bp, Probe sequence
ctcgatacgctggaaaaagtgcgcg

SEQ ID NO: 280346 - DNA, 25 bp, Probe sequence
ctgttctggcggcattgtgggctta

SEQ ID NO: 280347 - DNA, 25 bp, Probe sequence
ctgccgacgccgccggaaagcgtgc

SEQ ID NO: 280348 - DNA, 25 bp, Probe sequence
cgggatcaaagtctgttctggcggc

SEQ ID NO: 280349 - DNA, 25 bp, Probe sequence
cgccggaaagcgtgccaatcaacat

SEQ ID NO: 280350 - DNA, 25 bp, Probe sequence
cggaaagcgtgccaatcaacatgct

SEQ ID NO: 280351 - DNA, 25 bp, Probe sequence
cgcctcgatacgctggaaaaagtgc

SEQ ID NO: 280352 - DNA, 25 bp, Probe sequence
cggattattgctgcaactggcaaac

SEQ ID NO: 280353 - DNA, 25 bp, Probe sequence
cgttgagtgaatctcaggcgcagcg

SEQ ID NO: 280354 - DNA, 25 bp, Probe sequence
cgtgccaatcaacatgctggtgaag

SEQ ID NO: 280355 - DNA, 25 bp, Probe sequence
cgcgatgccgggatcaaagtctgtt

SEQ ID NO: 280356 - DNA, 25 bp, Probe sequence
ccggattattgctgcaactggcaaa

SEQ ID NO: 280357 - DNA, 25 bp, Probe sequence
cgcacttatcaggaacgcctcgata

SEQ ID NO: 280358 - DNA, 25 bp, Probe sequence
tcgcgaacgccgggctggattacta

SEQ ID NO: 280359 - DNA, 25 bp, Probe sequence
cgccggattattgctgcaactggca

SEQ ID NO: 280360 - DNA, 25 bp, Probe sequence
gcgcctcgcgaacgccgggctggat

SEQ ID NO: 280361 - DNA, 25 bp, Probe sequence
cgcgccggattattgctgcaactgg

SEQ ID NO: 280362 - DNA, 25 bp, Probe sequence
ccgccggaaagcgtgccaatcaaca

SEQ ID NO: 280363 - DNA, 25 bp, Probe sequence
gcctcgcgaacgccgggctggatta

SEQ ID NO: 280364 - DNA, 25 bp, Probe sequence
ccacacgcacttatcaggaacgcct

SEQ ID NO: 280365 - DNA, 25 bp, Probe sequence
gcctcgatacgctggaaaaagtgcg

SEQ ID NO: 280366 - DNA, 25 bp, Probe sequence
gccaatcaacatgctggtgaaggtg

SEQ ID NO: 280367 - DNA, 25 bp, Probe sequence
gccgacgccgccggaaagcgtgcca

SEQ ID NO: 280368 - DNA, 25 bp, Probe sequence
gccggaaagcgtgccaatcaacatg

SEQ ID NO: 280369 - DNA, 25 bp, Probe sequence
gcgccggattattgctgcaactggc

SEQ ID NO: 280370 - DNA, 25 bp, Probe sequence
gcgcgatgccgggatcaaagtctgt

SEQ ID NO: 280371 - DNA, 25 bp, Probe sequence
gccgccggaaagcgtgccaatcaac

SEQ ID NO: 280372 - DNA, 25 bp, Probe sequence
gcgatgccgggatcaaagtctgttc

SEQ ID NO: 280373 - DNA, 25 bp, Probe sequence
gctggattactacaaccacaacctg

SEQ ID NO: 280374 - DNA, 25 bp, Probe sequence
gcgtgccaatcaacatgctggtgaa

SEQ ID NO: 280375 - DNA, 25 bp, Probe sequence
gcggcattgtgggcttaggcgaaac

SEQ ID NO: 280376 - DNA, 25 bp, Probe sequence
gctgcaactggcaaacctgccgacg

SEQ ID NO: 280377 - DNA, 25 bp, Probe sequence
gctgggcacgttgagtgaatctcag

SEQ ID NO: 280378 - DNA, 25 bp, Probe sequence
gcacttatcaggaacgcctcgatac

SEQ ID NO: 280379 - DNA, 25 bp, Probe sequence
gacgccgccggaaagcgtgccaatc

SEQ ID NO: 280380 - DNA, 25 bp, Probe sequence
gagttttacggcaatatcatcacca

SEQ ID NO: 280381 - DNA, 25 bp, Probe sequence
gatcaaagtctgttctggcggcatt

SEQ ID NO: 280382 - DNA, 25 bp, Probe sequence
gattactacaaccacaacctggaca

SEQ ID NO: 280383 - DNA, 25 bp, Probe sequence
gttttacggcaatatcatcaccaca

SEQ ID NO: 280384 - DNA, 25 bp, Probe sequence
gtaaaagatcgcgccggattattgc

SEQ ID NO: 280385 - DNA, 25 bp, Probe sequence
gtctgttctggcggcattgtgggct

SEQ ID NO: 280386 - DNA, 25 bp, Probe sequence
tgagtgaatctcaggcgcagcgcct

SEQ ID NO: 280387 - DNA, 25 bp, Probe sequence
ggatcaaagtctgttctggcggcat

SEQ ID NO: 280388 - DNA, 25 bp, Probe sequence
ggaaagcgtgccaatcaacatgctg

SEQ ID NO: 280389 - DNA, 25 bp, Probe sequence
ggcaatatcatcaccacacgcactt

SEQ ID NO: 280390 - DNA, 25 bp, Probe sequence
tggattactacaaccacaacctgga

SEQ ID NO: 280391 - DNA, 25 bp, Probe sequence
tgtatgacgctgggcacgttgagtg

SEQ ID NO: 280392 - DNA, 25 bp, Probe sequence
tgttctggcggcattgtgggcttag

SEQ ID NO: 280393 - DNA, 25 bp, Probe sequence
tgaatctcaggcgcagcgcctcgcg

SEQ ID NO: 280394 - DNA, 25 bp, Probe sequence
tgctgcaactggcaaacctgccgac

SEQ ID NO: 280395 - DNA, 25 bp, Probe sequence
tgacgctgggcacgttgagtgaatc

SEQ ID NO: 280396 - DNA, 25 bp, Probe sequence
tgccgacgccgccggaaagcgtgcc

SEQ ID NO: 280397 - DNA, 25 bp, Probe sequence
tgcaactggcaaacctgccgacgcc

SEQ ID NO: 280398 - DNA, 25 bp, Probe sequence
tgccgggatcaaagtctgttctggc

SEQ ID NO: 280399 - DNA, 25 bp, Probe sequence
tgccaatcaacatgctggtgaaggt

SEQ ID NO: 280400 - DNA, 25 bp, Probe sequence
tctcaggcgcagcgcctcgcgaacg

SEQ ID NO: 280401 - DNA, 25 bp, Probe sequence
tgcgcgatgccgggatcaaagtctg

SEQ ID NO: 280402 - DNA, 25 bp, Probe sequence
tcgcgccggattattgctgcaactg

SEQ ID NO: 280403 - DNA, 25 bp, Probe sequence
tcaccacacgcacttatcaggaacg

SEQ ID NO: 280404 - DNA, 25 bp, Probe sequence
tcatcaccacacgcacttatcagga

SEQ ID NO: 280405 - DNA, 25 bp, Probe sequence
tcaacatgctggtgaaggtgaaagg

SEQ ID NO: 280406 - DNA, 25 bp, Probe sequence
tcaggaacgcctcgatacgctggaa

SEQ ID NO: 280407 - DNA, 25 bp, Probe sequence
tcaaagtctgttctggcggcattgt

SEQ ID NO: 280408 - DNA, 25 bp, Probe sequence
tacgctggaaaaagtgcgcgatgcc

SEQ ID NO: 280409 - DNA, 25 bp, Probe sequence
tatgacgctgggcacgttgagtgaa

SEQ ID NO: 280410 - DNA, 25 bp, Probe sequence
tattgctgcaactggcaaacctgcc

SEQ ID NO: 280411 - DNA, 25 bp, Probe sequence
ttatcaggaacgcctcgatacgctg

SEQ ID NO: 280412 - DNA, 25 bp, Probe sequence
tttacggcaatatcatcaccacacg

SEQ ID NO: 280413 - DNA, 25 bp, Probe sequence
ttattgctgcaactggcaaacctgc

SEQ ID NO: 280414 - DNA, 25 bp, Probe sequence
ttttacggcaatatcatcaccacac

SEQ ID NO: 280415 - DNA, 25 bp, Probe sequence
ttacggcaatatcatcaccacacgc

SEQ ID NO: 280416 - DNA, 25 bp, Probe sequence
attgcaactggcctggccgcaacag

SEQ ID NO: 280417 - DNA, 25 bp, Probe sequence
atcttcatgaagggcgcgacccgcg

SEQ ID NO: 280418 - DNA, 25 bp, Probe sequence
aatcgaacagtcgctgaacggcgtg

SEQ ID NO: 280419 - DNA, 25 bp, Probe sequence
attaacgcgttcgcagttgcagcga

SEQ ID NO: 280420 - DNA, 25 bp, Probe sequence
atatcctctgacgtatcatcttttt

SEQ ID NO: 280421 - DNA, 25 bp, Probe sequence
atcaacatcatattcagcccatcac

SEQ ID NO: 280422 - DNA, 25 bp, Probe sequence
atcacgctgtggtttgatgatgcgc

SEQ ID NO: 280423 - DNA, 25 bp, Probe sequence
atcatattcagcccatcacgctgtg

SEQ ID NO: 280424 - DNA, 25 bp, Probe sequence
atgcgctcagtgccatgcgttcgct

SEQ ID NO: 280425 - DNA, 25 bp, Probe sequence
atgatgcgctcagtgccatgcgttc

SEQ ID NO: 280426 - DNA, 25 bp, Probe sequence
atgaaatcgaacagtcgctgaacgg

SEQ ID NO: 280427 - DNA, 25 bp, Probe sequence
aggcatcggtgccacgcatcttcat

SEQ ID NO: 280428 - DNA, 25 bp, Probe sequence
agcgtccgcatgctaatcgcttttt

SEQ ID NO: 280429 - DNA, 25 bp, Probe sequence
aggggcgatatcctctgacgtatca

SEQ ID NO: 280430 - DNA, 25 bp, Probe sequence
agtcgctgaacggcgtgcattatca

SEQ ID NO: 280431 - DNA, 25 bp, Probe sequence
agttgcagcgattgcaactggcctg

SEQ ID NO: 280432 - DNA, 25 bp, Probe sequence
agcgattgcaactggcctggccgca

SEQ ID NO: 280433 - DNA, 25 bp, Probe sequence
agcccatcacgctgtggtttgatga

SEQ ID NO: 280434 - DNA, 25 bp, Probe sequence
agcaggggcgatatcctctgacgta

SEQ ID NO: 280435 - DNA, 25 bp, Probe sequence
accacgctggtgcagggatcgttac

SEQ ID NO: 280436 - DNA, 25 bp, Probe sequence
acccgaactgcatcaggcgtggcag

SEQ ID NO: 280437 - DNA, 25 bp, Probe sequence
acgagcgtccgcatgctaatcgctt

SEQ ID NO: 280438 - DNA, 25 bp, Probe sequence
actggcctggccgcaacagcagggg

SEQ ID NO: 280439 - DNA, 25 bp, Probe sequence
acggcgtgcattatcaacatcatat

SEQ ID NO: 280440 - DNA, 25 bp, Probe sequence
acatcatattcagcccatcacgctg

SEQ ID NO: 280441 - DNA, 25 bp, Probe sequence
aactgcatcaggcgtggcaggcggt

SEQ ID NO: 280442 - DNA, 25 bp, Probe sequence
aacagcaggggcgatatcctctgac

SEQ ID NO: 280443 - DNA, 25 bp, Probe sequence
aacatcatattcagcccatcacgct

SEQ ID NO: 280444 - DNA, 25 bp, Probe sequence
aacggcgtgcattatcaacatcata

SEQ ID NO: 280445 - DNA, 25 bp, Probe sequence
aacgcgttcgcagttgcagcgattg

SEQ ID NO: 280446 - DNA, 25 bp, Probe sequence
aaggcatcggtgccacgcatcttca

SEQ ID NO: 280447 - DNA, 25 bp, Probe sequence
caacatcatattcagcccatcacgc

SEQ ID NO: 280448 - DNA, 25 bp, Probe sequence
cacgctggtgcagggatcgttaccc

SEQ ID NO: 280449 - DNA, 25 bp, Probe sequence
cacgcatcttcatgaagggcgcgac

SEQ ID NO: 280450 - DNA, 25 bp, Probe sequence
catgaagggcgcgacccgcgaatat

SEQ ID NO: 280451 - DNA, 25 bp, Probe sequence
catcggtgccacgcatcttcatgaa

SEQ ID NO: 280452 - DNA, 25 bp, Probe sequence
cagtgccatgcgttcgctgaaaggc

SEQ ID NO: 280453 - DNA, 25 bp, Probe sequence
catgcgttcgctgaaaggcatcggt

SEQ ID NO: 280454 - DNA, 25 bp, Probe sequence
catcacgctgtggtttgatgatgcg

SEQ ID NO: 280455 - DNA, 25 bp, Probe sequence
ctcagtgccatgcgttcgctgaaag

SEQ ID NO: 280456 - DNA, 25 bp, Probe sequence
cgttacccgaactgcatcaggcgtg

SEQ ID NO: 280457 - DNA, 25 bp, Probe sequence
cgtgcattatcaacatcatattcag

SEQ ID NO: 280458 - DNA, 25 bp, Probe sequence
cgttcgcagttgcagcgattgcaac

SEQ ID NO: 280459 - DNA, 25 bp, Probe sequence
cgatatcctctgacgtatcatcttt

SEQ ID NO: 280460 - DNA, 25 bp, Probe sequence
cgagcgtccgcatgctaatcgcttt

SEQ ID NO: 280461 - DNA, 25 bp, Probe sequence
cgaacagtcgctgaacggcgtgcat

SEQ ID NO: 280462 - DNA, 25 bp, Probe sequence
cgctgaaaggcatcggtgccacgca

SEQ ID NO: 280463 - DNA, 25 bp, Probe sequence
cgctcagtgccatgcgttcgctgaa

SEQ ID NO: 280464 - DNA, 25 bp, Probe sequence
cgcatgctaatcgctttttaccgcc

SEQ ID NO: 280465 - DNA, 25 bp, Probe sequence
cgaactgcatcaggcgtggcaggcg

SEQ ID NO: 280466 - DNA, 25 bp, Probe sequence
cgctgaacggcgtgcattatcaaca

SEQ ID NO: 280467 - DNA, 25 bp, Probe sequence
ccgcatgctaatcgctttttaccgc

SEQ ID NO: 280468 - DNA, 25 bp, Probe sequence
gccgcaacagcaggggcgatatcct

SEQ ID NO: 280469 - DNA, 25 bp, Probe sequence
ccgcaacagcaggggcgatatcctc

SEQ ID NO: 280470 - DNA, 25 bp, Probe sequence
ccatcacgctgtggtttgatgatgc

SEQ ID NO: 280471 - DNA, 25 bp, Probe sequence
gcgttcgcagttgcagcgattgcaa

SEQ ID NO: 280472 - DNA, 25 bp, Probe sequence
gcgttcgctgaaaggcatcggtgcc

SEQ ID NO: 280473 - DNA, 25 bp, Probe sequence
gcgatatcctctgacgtatcatctt

SEQ ID NO: 280474 - DNA, 25 bp, Probe sequence
gcgtccgcatgctaatcgcttttta

SEQ ID NO: 280475 - DNA, 25 bp, Probe sequence
gcgtgcattatcaacatcatattca

SEQ ID NO: 280476 - DNA, 25 bp, Probe sequence
gctcagtgccatgcgttcgctgaaa

SEQ ID NO: 280477 - DNA, 25 bp, Probe sequence
gctgaacggcgtgcattatcaacat

SEQ ID NO: 280478 - DNA, 25 bp, Probe sequence
gcattatcaacatcatattcagccc

SEQ ID NO: 280479 - DNA, 25 bp, Probe sequence
gcatcttcatgaagggcgcgacccg

SEQ ID NO: 280480 - DNA, 25 bp, Probe sequence
gcagggatcgttacccgaactgcat

SEQ ID NO: 280481 - DNA, 25 bp, Probe sequence
gcagcgattgcaactggcctggccg

SEQ ID NO: 280482 - DNA, 25 bp, Probe sequence
gcaacagcaggggcgatatcctctg

SEQ ID NO: 280483 - DNA, 25 bp, Probe sequence
gcaactggcctggccgcaacagcag

SEQ ID NO: 280484 - DNA, 25 bp, Probe sequence
gaatattaacgcgttcgcagttgca

SEQ ID NO: 280485 - DNA, 25 bp, Probe sequence
gaacggcgtgcattatcaacatcat

SEQ ID NO: 280486 - DNA, 25 bp, Probe sequence
gaaaggcatcggtgccacgcatctt

SEQ ID NO: 280487 - DNA, 25 bp, Probe sequence
gatcgttacccgaactgcatcaggc

SEQ ID NO: 280488 - DNA, 25 bp, Probe sequence
gatatcctctgacgtatcatctttt

SEQ ID NO: 280489 - DNA, 25 bp, Probe sequence
gattgcaactggcctggccgcaaca

SEQ ID NO: 280490 - DNA, 25 bp, Probe sequence
gttgcagcgattgcaactggcctgg

SEQ ID NO: 280491 - DNA, 25 bp, Probe sequence
gttcgcagttgcagcgattgcaact

SEQ ID NO: 280492 - DNA, 25 bp, Probe sequence
gtttgatgatgcgctcagtgccatg

SEQ ID NO: 280493 - DNA, 25 bp, Probe sequence
gtcgctgaacggcgtgcattatcaa

SEQ ID NO: 280494 - DNA, 25 bp, Probe sequence
gtgccacgcatcttcatgaagggcg

SEQ ID NO: 280495 - DNA, 25 bp, Probe sequence
gtgccatgcgttcgctgaaaggcat

SEQ ID NO: 280496 - DNA, 25 bp, Probe sequence
ggtgccacgcatcttcatgaagggc

SEQ ID NO: 280497 - DNA, 25 bp, Probe sequence
gggatcgttacccgaactgcatcag

SEQ ID NO: 280498 - DNA, 25 bp, Probe sequence
ggggcgatatcctctgacgtatcat

SEQ ID NO: 280499 - DNA, 25 bp, Probe sequence
ggtggacgagcgtccgcatgctaat

SEQ ID NO: 280500 - DNA, 25 bp, Probe sequence
tggacgagcgtccgcatgctaatcg

SEQ ID NO: 280501 - DNA, 25 bp, Probe sequence
ggccgcaacagcaggggcgatatcc

SEQ ID NO: 280502 - DNA, 25 bp, Probe sequence
tgcgctcagtgccatgcgttcgctg

SEQ ID NO: 280503 - DNA, 25 bp, Probe sequence
tgcagggatcgttacccgaactgca

SEQ ID NO: 280504 - DNA, 25 bp, Probe sequence
tgaaaggcatcggtgccacgcatct

SEQ ID NO: 280505 - DNA, 25 bp, Probe sequence
tgaaatcgaacagtcgctgaacggc

SEQ ID NO: 280506 - DNA, 25 bp, Probe sequence
tgcaactggcctggccgcaacagca

SEQ ID NO: 280507 - DNA, 25 bp, Probe sequence
tgccacgcatcttcatgaagggcgc

SEQ ID NO: 280508 - DNA, 25 bp, Probe sequence
tgaagggcgcgacccgcgaatatta

SEQ ID NO: 280509 - DNA, 25 bp, Probe sequence
tgcattatcaacatcatattcagcc

SEQ ID NO: 280510 - DNA, 25 bp, Probe sequence
tgcgttcgctgaaaggcatcggtgc

SEQ ID NO: 280511 - DNA, 25 bp, Probe sequence
tcgctttttaccgccagatgaaatc

SEQ ID NO: 280512 - DNA, 25 bp, Probe sequence
tccgcatgctaatcgctttttaccg

SEQ ID NO: 280513 - DNA, 25 bp, Probe sequence
tcatgaagggcgcgacccgcgaata

SEQ ID NO: 280514 - DNA, 25 bp, Probe sequence
tcggtgccacgcatcttcatgaagg

SEQ ID NO: 280515 - DNA, 25 bp, Probe sequence
tcatattcagcccatcacgctgtgg

SEQ ID NO: 280516 - DNA, 25 bp, Probe sequence
taacgcgttcgcagttgcagcgatt

SEQ ID NO: 280517 - DNA, 25 bp, Probe sequence
tacccgaactgcatcaggcgtggca

SEQ ID NO: 280518 - DNA, 25 bp, Probe sequence
ttcatgaagggcgcgacccgcgaat

SEQ ID NO: 280519 - DNA, 25 bp, Probe sequence
tttaccgccagatgaaatcgaacag

SEQ ID NO: 280520 - DNA, 25 bp, Probe sequence
ttcgctgaaaggcatcggtgccacg

SEQ ID NO: 280521 - DNA, 25 bp, Probe sequence
tattcagcccatcacgctgtggttt

SEQ ID NO: 280522 - DNA, 25 bp, Probe sequence
ttttaccgccagatgaaatcgaaca

SEQ ID NO: 280523 - DNA, 25 bp, Probe sequence
ttgcaactggcctggccgcaacagc

SEQ ID NO: 280524 - DNA, 25 bp, Probe sequence
ttatcaacatcatattcagcccatc

SEQ ID NO: 280525 - DNA, 25 bp, Probe sequence
ttcagcccatcacgctgtggtttga

SEQ ID NO: 280526 - DNA, 25 bp, Probe sequence
atccacggcactccgcgagctgtat

SEQ ID NO: 280527 - DNA, 25 bp, Probe sequence
atccctgccgttagcgactgcgacg

SEQ ID NO: 280528 - DNA, 25 bp, Probe sequence
atgccgcagaccattatctggcggg

SEQ ID NO: 280529 - DNA, 25 bp, Probe sequence
atgcttccacagcgtaaatacaccc

SEQ ID NO: 280530 - DNA, 25 bp, Probe sequence
atgcttgttcaggcacgccagaagg

SEQ ID NO: 280531 - DNA, 25 bp, Probe sequence
atgcagatctacagcgccagagtgc

SEQ ID NO: 280532 - DNA, 25 bp, Probe sequence
atgagcaacatgcagatctacagcg

SEQ ID NO: 280533 - DNA, 25 bp, Probe sequence
atggagcaatctcgcagtgcagtgg

SEQ ID NO: 280534 - DNA, 25 bp, Probe sequence
aggtgacggccttagatctctcgcc

SEQ ID NO: 280535 - DNA, 25 bp, Probe sequence
catttggtcgggcagccgcacacta

SEQ ID NO: 280536 - DNA, 25 bp, Probe sequence
agaaggatgccgcagaccattatct

SEQ ID NO: 280537 - DNA, 25 bp, Probe sequence
agccattgcagcggcatttggtcgg

SEQ ID NO: 280538 - DNA, 25 bp, Probe sequence
agcgactgcgacgttcgatcttgca

SEQ ID NO: 280539 - DNA, 25 bp, Probe sequence
agcgccagagtgctgacgccttact

SEQ ID NO: 280540 - DNA, 25 bp, Probe sequence
acgccttactggcaatgcttccaca

SEQ ID NO: 280541 - DNA, 25 bp, Probe sequence
acgcgcaggtgacggccttagatct

SEQ ID NO: 280542 - DNA, 25 bp, Probe sequence
acggcactccgcgagctgtatcggg

SEQ ID NO: 280543 - DNA, 25 bp, Probe sequence
acggccttagatctctcgccgccaa

SEQ ID NO: 280544 - DNA, 25 bp, Probe sequence
acgttcgatcttgcatggagcaatc

SEQ ID NO: 280545 - DNA, 25 bp, Probe sequence
cagcggcatttggtcgggcagccgc

SEQ ID NO: 280546 - DNA, 25 bp, Probe sequence
actgcgacgttcgatcttgcatgga

SEQ ID NO: 280547 - DNA, 25 bp, Probe sequence
actatgagcaacatgcagatctaca

SEQ ID NO: 280548 - DNA, 25 bp, Probe sequence
aacatgcagatctacagcgccagag

SEQ ID NO: 280549 - DNA, 25 bp, Probe sequence
aatccctgccgttagcgactgcgac

SEQ ID NO: 280550 - DNA, 25 bp, Probe sequence
aaggatgccgcagaccattatctgg

SEQ ID NO: 280551 - DNA, 25 bp, Probe sequence
caagccattgcagcggcatttggtc

SEQ ID NO: 280552 - DNA, 25 bp, Probe sequence
aatgcttgttcaggcacgccagaag

SEQ ID NO: 280553 - DNA, 25 bp, Probe sequence
caatgcttccacagcgtaaatacac

SEQ ID NO: 280554 - DNA, 25 bp, Probe sequence
cagagtgctgacgccttactggcaa

SEQ ID NO: 280555 - DNA, 25 bp, Probe sequence
caggcacgccagaaggatgccgcag

SEQ ID NO: 280556 - DNA, 25 bp, Probe sequence
cactccgcgagctgtatcgggtggt

SEQ ID NO: 280557 - DNA, 25 bp, Probe sequence
cagcgccagagtgctgacgccttac

SEQ ID NO: 280558 - DNA, 25 bp, Probe sequence
cacgcgcaggtgacggccttagatc

SEQ ID NO: 280559 - DNA, 25 bp, Probe sequence
cagccgcacactatgagcaacatgc

SEQ ID NO: 280560 - DNA, 25 bp, Probe sequence
cagatctacagcgccagagtgctga

SEQ ID NO: 280561 - DNA, 25 bp, Probe sequence
catgcagatctacagcgccagagtg

SEQ ID NO: 280562 - DNA, 25 bp, Probe sequence
cattgcagcggcatttggtcgggca

SEQ ID NO: 280563 - DNA, 25 bp, Probe sequence
cttgttcaggcacgccagaaggatg

SEQ ID NO: 280564 - DNA, 25 bp, Probe sequence
cttactggcaatgcttccacagcgt

SEQ ID NO: 280565 - DNA, 25 bp, Probe sequence
ctatgagcaacatgcagatctacag

SEQ ID NO: 280566 - DNA, 25 bp, Probe sequence
ctgccgttagcgactgcgacgttcg

SEQ ID NO: 280567 - DNA, 25 bp, Probe sequence
tggacctggctggatgagccgccac

SEQ ID NO: 280568 - DNA, 25 bp, Probe sequence
gccgttagcgactgcgacgttcgat

SEQ ID NO: 280569 - DNA, 25 bp, Probe sequence
cgacgttcgatcttgcatggagcaa

SEQ ID NO: 280570 - DNA, 25 bp, Probe sequence
cgtcacgcgcaggtgacggccttag

SEQ ID NO: 280571 - DNA, 25 bp, Probe sequence
cgccagaaggatgccgcagaccatt

SEQ ID NO: 280572 - DNA, 25 bp, Probe sequence
cgccaatgcttgttcaggcacgcca

SEQ ID NO: 280573 - DNA, 25 bp, Probe sequence
ccacggcactccgcgagctgtatcg

SEQ ID NO: 280574 - DNA, 25 bp, Probe sequence
cctggctggatgagccgccactggc

SEQ ID NO: 280575 - DNA, 25 bp, Probe sequence
tcgaatccctgccgttagcgactgc

SEQ ID NO: 280576 - DNA, 25 bp, Probe sequence
gccttactggcaatgcttccacagc

SEQ ID NO: 280577 - DNA, 25 bp, Probe sequence
gccttagatctctcgccgccaatgc

SEQ ID NO: 280578 - DNA, 25 bp, Probe sequence
gccgccaatgcttgttcaggcacgc

SEQ ID NO: 280579 - DNA, 25 bp, Probe sequence
gccgcacactatgagcaacatgcag

SEQ ID NO: 280580 - DNA, 25 bp, Probe sequence
gcggcatttggtcgggcagccgcac

SEQ ID NO: 280581 - DNA, 25 bp, Probe sequence
gcgccagagtgctgacgccttactg

SEQ ID NO: 280582 - DNA, 25 bp, Probe sequence
gcgactgcgacgttcgatcttgcat

SEQ ID NO: 280583 - DNA, 25 bp, Probe sequence
gctgacgccttactggcaatgcttc

SEQ ID NO: 280584 - DNA, 25 bp, Probe sequence
gcttccacagcgtaaatacacccac

SEQ ID NO: 280585 - DNA, 25 bp, Probe sequence
gcatttggtcgggcagccgcacact

SEQ ID NO: 280586 - DNA, 25 bp, Probe sequence
gcatggagcaatctcgcagtgcagt

SEQ ID NO: 280587 - DNA, 25 bp, Probe sequence
gcaggtgacggccttagatctctcg

SEQ ID NO: 280588 - DNA, 25 bp, Probe sequence
gcagccgcacactatgagcaacatg

SEQ ID NO: 280589 - DNA, 25 bp, Probe sequence
gcacgccagaaggatgccgcagacc

SEQ ID NO: 280590 - DNA, 25 bp, Probe sequence
gcaatgcttccacagcgtaaataca

SEQ ID NO: 280591 - DNA, 25 bp, Probe sequence
gacggccttagatctctcgccgcca

SEQ ID NO: 280592 - DNA, 25 bp, Probe sequence
gacctggctggatgagccgccactg

SEQ ID NO: 280593 - DNA, 25 bp, Probe sequence
gagccgccactggcgggaacgtcac

SEQ ID NO: 280594 - DNA, 25 bp, Probe sequence
gacgccttactggcaatgcttccac

SEQ ID NO: 280595 - DNA, 25 bp, Probe sequence
gagatatcgaatccctgccgttagc

SEQ ID NO: 280596 - DNA, 25 bp, Probe sequence
gagcaacatgcagatctacagcgcc

SEQ ID NO: 280597 - DNA, 25 bp, Probe sequence
gagtgctgacgccttactggcaatg

SEQ ID NO: 280598 - DNA, 25 bp, Probe sequence
gatgagccgccactggcgggaacgt

SEQ ID NO: 280599 - DNA, 25 bp, Probe sequence
gatatcgaatccctgccgttagcga

SEQ ID NO: 280600 - DNA, 25 bp, Probe sequence
gttcgatcttgcatggagcaatctc

SEQ ID NO: 280601 - DNA, 25 bp, Probe sequence
gttaataaacaagccattgcagcgg

SEQ ID NO: 280602 - DNA, 25 bp, Probe sequence
gtgctgacgccttactggcaatgct

SEQ ID NO: 280603 - DNA, 25 bp, Probe sequence
gtgacggccttagatctctcgccgc

SEQ ID NO: 280604 - DNA, 25 bp, Probe sequence
tggtgcgccccaaaggcgtggtcgc

SEQ ID NO: 280605 - DNA, 25 bp, Probe sequence
gtcgggcagccgcacactatgagca

SEQ ID NO: 280606 - DNA, 25 bp, Probe sequence
tgttcaggcacgccagaaggatgcc

SEQ ID NO: 280607 - DNA, 25 bp, Probe sequence
gtgcggtaatttatccacggcactc

SEQ ID NO: 280608 - DNA, 25 bp, Probe sequence
gtgcagtggtgcggtaatttatcca

SEQ ID NO: 280609 - DNA, 25 bp, Probe sequence
ggcacgccagaaggatgccgcagac

SEQ ID NO: 280610 - DNA, 25 bp, Probe sequence
ggttaataaacaagccattgcagcg

SEQ ID NO: 280611 - DNA, 25 bp, Probe sequence
ggatgccgcagaccattatctggcg

SEQ ID NO: 280612 - DNA, 25 bp, Probe sequence
ggcaatgcttccacagcgtaaatac

SEQ ID NO: 280613 - DNA, 25 bp, Probe sequence
ggcagccgcacactatgagcaacat

SEQ ID NO: 280614 - DNA, 25 bp, Probe sequence
tggtcgggcagccgcacactatgag

SEQ ID NO: 280615 - DNA, 25 bp, Probe sequence
tggagcaatctcgcagtgcagtggt

SEQ ID NO: 280616 - DNA, 25 bp, Probe sequence
tgccgcagaccattatctggcggga

SEQ ID NO: 280617 - DNA, 25 bp, Probe sequence
tgcagatctacagcgccagagtgct

SEQ ID NO: 280618 - DNA, 25 bp, Probe sequence
tgcttgttcaggcacgccagaagga

SEQ ID NO: 280619 - DNA, 25 bp, Probe sequence
tcttgcatggagcaatctcgcagtg

SEQ ID NO: 280620 - DNA, 25 bp, Probe sequence
tcgccgccaatgcttgttcaggcac

SEQ ID NO: 280621 - DNA, 25 bp, Probe sequence
tcgatcttgcatggagcaatctcgc

SEQ ID NO: 280622 - DNA, 25 bp, Probe sequence
tctcgccgccaatgcttgttcaggc

SEQ ID NO: 280623 - DNA, 25 bp, Probe sequence
tctctcgccgccaatgcttgttcag

SEQ ID NO: 280624 - DNA, 25 bp, Probe sequence
tctacagcgccagagtgctgacgcc

SEQ ID NO: 280625 - DNA, 25 bp, Probe sequence
tctcgcagtgcagtggtgcggtaat

SEQ ID NO: 280626 - DNA, 25 bp, Probe sequence
tcacgcgcaggtgacggccttagat

SEQ ID NO: 280627 - DNA, 25 bp, Probe sequence
taatttatccacggcactccgcgag

SEQ ID NO: 280628 - DNA, 25 bp, Probe sequence
taaacaagccattgcagcggcattt

SEQ ID NO: 280629 - DNA, 25 bp, Probe sequence
tacagcgccagagtgctgacgcctt

SEQ ID NO: 280630 - DNA, 25 bp, Probe sequence
tactggcaatgcttccacagcgtaa

SEQ ID NO: 280631 - DNA, 25 bp, Probe sequence
tagatctctcgccgccaatgcttgt

SEQ ID NO: 280632 - DNA, 25 bp, Probe sequence
tatcgaatccctgccgttagcgact

SEQ ID NO: 280633 - DNA, 25 bp, Probe sequence
tttggtcgggcagccgcacactatg

SEQ ID NO: 280634 - DNA, 25 bp, Probe sequence
ttatccacggcactccgcgagctgt

SEQ ID NO: 280635 - DNA, 25 bp, Probe sequence
ttagcgactgcgacgttcgatcttg

SEQ ID NO: 280636 - DNA, 25 bp, Probe sequence
attaatcacgcgatgttgactgcac

SEQ ID NO: 280637 - DNA, 25 bp, Probe sequence
atatatgaccacgctcacccgcatg

SEQ ID NO: 280638 - DNA, 25 bp, Probe sequence
atacaacacgccggactgactctgg

SEQ ID NO: 280639 - DNA, 25 bp, Probe sequence
atcacgcgatgttgactgcacaggt

SEQ ID NO: 280640 - DNA, 25 bp, Probe sequence
atcccctggcttgcagaaaatccag

SEQ ID NO: 280641 - DNA, 25 bp, Probe sequence
atgttgactgcacaggtaatacaac

SEQ ID NO: 280642 - DNA, 25 bp, Probe sequence
agatcccctggcttgcagaaaatcc

SEQ ID NO: 280643 - DNA, 25 bp, Probe sequence
agagatcccctggcttgcagaaaat

SEQ ID NO: 280644 - DNA, 25 bp, Probe sequence
acgcgatgttgactgcacaggtaat

SEQ ID NO: 280645 - DNA, 25 bp, Probe sequence
acgtcacgctgaatatatgaccacg

SEQ ID NO: 280646 - DNA, 25 bp, Probe sequence
actgcacaggtaatacaacacgccg

SEQ ID NO: 280647 - DNA, 25 bp, Probe sequence
actcggctgtattaatcacgcgatg

SEQ ID NO: 280648 - DNA, 25 bp, Probe sequence
acacaggaacaactgccggtgatac

SEQ ID NO: 280649 - DNA, 25 bp, Probe sequence
acaacaggctgactgggtgttagtg

SEQ ID NO: 280650 - DNA, 25 bp, Probe sequence
acaacacgccggactgactctggcg

SEQ ID NO: 280651 - DNA, 25 bp, Probe sequence
aaactcggctgtattaatcacgcga

SEQ ID NO: 280652 - DNA, 25 bp, Probe sequence
aaacgtcacgctgaatatatgacca

SEQ ID NO: 280653 - DNA, 25 bp, Probe sequence
aacacaggaacaactgccggtgata

SEQ ID NO: 280654 - DNA, 25 bp, Probe sequence
aacaggctgactgggtgttagtgga

SEQ ID NO: 280655 - DNA, 25 bp, Probe sequence
aactcggctgtattaatcacgcgat

SEQ ID NO: 280656 - DNA, 25 bp, Probe sequence
aatcacgcgatgttgactgcacagg

SEQ ID NO: 280657 - DNA, 25 bp, Probe sequence
aatatatgaccacgctcacccgcat

SEQ ID NO: 280658 - DNA, 25 bp, Probe sequence
caacacgccggactgactctggcgg

SEQ ID NO: 280659 - DNA, 25 bp, Probe sequence
caacaggctgactgggtgttagtgg

SEQ ID NO: 280660 - DNA, 25 bp, Probe sequence
cacaggaacaactgccggtgatact

SEQ ID NO: 280661 - DNA, 25 bp, Probe sequence
cacttttgcagattgggtaacacag

SEQ ID NO: 280662 - DNA, 25 bp, Probe sequence
cacgcgatgttgactgcacaggtaa

SEQ ID NO: 280663 - DNA, 25 bp, Probe sequence
caggtaatacaacacgccggactga

SEQ ID NO: 280664 - DNA, 25 bp, Probe sequence
caggaacaactgccggtgatactgg

SEQ ID NO: 280665 - DNA, 25 bp, Probe sequence
ctttctgacactttcacttttgcag

SEQ ID NO: 280666 - DNA, 25 bp, Probe sequence
ctcggctgtattaatcacgcgatgt

SEQ ID NO: 280667 - DNA, 25 bp, Probe sequence
ctgaatatatgaccacgctcacccg

SEQ ID NO: 280668 - DNA, 25 bp, Probe sequence
ctgacactttcacttttgcagattg

SEQ ID NO: 280669 - DNA, 25 bp, Probe sequence
ctgccggtgatactggtagttggtg

SEQ ID NO: 280670 - DNA, 25 bp, Probe sequence
ctgctgggagagatcccctggcttg

SEQ ID NO: 280671 - DNA, 25 bp, Probe sequence
ctggcttgcagaaaatccagaaaat

SEQ ID NO: 280672 - DNA, 25 bp, Probe sequence
ccgctgctgggagagatcccctggc

SEQ ID NO: 280673 - DNA, 25 bp, Probe sequence
gccgctgctgggagagatcccctgg

SEQ ID NO: 280674 - DNA, 25 bp, Probe sequence
cggctgtattaatcacgcgatgttg

SEQ ID NO: 280675 - DNA, 25 bp, Probe sequence
cgtcacgctgaatatatgaccacgc

SEQ ID NO: 280676 - DNA, 25 bp, Probe sequence
ccgcgccgctgctgggagagatccc

SEQ ID NO: 280677 - DNA, 25 bp, Probe sequence
cgcgatgttgactgcacaggtaata

SEQ ID NO: 280678 - DNA, 25 bp, Probe sequence
cgctgctgggagagatcccctggct

SEQ ID NO: 280679 - DNA, 25 bp, Probe sequence
ccctggcttgcagaaaatccagaaa

SEQ ID NO: 280680 - DNA, 25 bp, Probe sequence
cctggcttgcagaaaatccagaaaa

SEQ ID NO: 280681 - DNA, 25 bp, Probe sequence
ccggtgatactggtagttggtgtga

SEQ ID NO: 280682 - DNA, 25 bp, Probe sequence
tcccctggcttgcagaaaatccaga

SEQ ID NO: 280683 - DNA, 25 bp, Probe sequence
cgccgctgctgggagagatcccctg

SEQ ID NO: 280684 - DNA, 25 bp, Probe sequence
gtgctggcggctggtttacgccgct

SEQ ID NO: 280685 - DNA, 25 bp, Probe sequence
gcgatgttgactgcacaggtaatac

SEQ ID NO: 280686 - DNA, 25 bp, Probe sequence
gctggtttacgccgctttctgacac

SEQ ID NO: 280687 - DNA, 25 bp, Probe sequence
gctgaatatatgaccacgctcaccc

SEQ ID NO: 280688 - DNA, 25 bp, Probe sequence
gctgtattaatcacgcgatgttgac

SEQ ID NO: 280689 - DNA, 25 bp, Probe sequence
gctttctgacactttcacttttgca

SEQ ID NO: 280690 - DNA, 25 bp, Probe sequence
gaatatatgaccacgctcacccgca

SEQ ID NO: 280691 - DNA, 25 bp, Probe sequence
gatcccctggcttgcagaaaatcca

SEQ ID NO: 280692 - DNA, 25 bp, Probe sequence
gaacaactgccggtgatactggtag

SEQ ID NO: 280693 - DNA, 25 bp, Probe sequence
gacactttcacttttgcagattggg

SEQ ID NO: 280694 - DNA, 25 bp, Probe sequence
gagagatcccctggcttgcagaaaa

SEQ ID NO: 280695 - DNA, 25 bp, Probe sequence
gagatcccctggcttgcagaaaatc

SEQ ID NO: 280696 - DNA, 25 bp, Probe sequence
gatgttgactgcacaggtaatacaa

SEQ ID NO: 280697 - DNA, 25 bp, Probe sequence
gatactggtagttggtgtgaaactc

SEQ ID NO: 280698 - DNA, 25 bp, Probe sequence
gttggtgtgaaactcggctgtatta

SEQ ID NO: 280699 - DNA, 25 bp, Probe sequence
gttgactgcacaggtaatacaacac

SEQ ID NO: 280700 - DNA, 25 bp, Probe sequence
gtattaatcacgcgatgttgactgc

SEQ ID NO: 280701 - DNA, 25 bp, Probe sequence
gtaacacaggaacaactgccggtga

SEQ ID NO: 280702 - DNA, 25 bp, Probe sequence
gtaatacaacacgccggactgactc

SEQ ID NO: 280703 - DNA, 25 bp, Probe sequence
gtgaaactcggctgtattaatcacg

SEQ ID NO: 280704 - DNA, 25 bp, Probe sequence
gtgatactggtagttggtgtgaaac

SEQ ID NO: 280705 - DNA, 25 bp, Probe sequence
gcgccgctgctgggagagatcccct

SEQ ID NO: 280706 - DNA, 25 bp, Probe sequence
gtgtgaaactcggctgtattaatca

SEQ ID NO: 280707 - DNA, 25 bp, Probe sequence
gggaaaacgtcacgctgaatatatg

SEQ ID NO: 280708 - DNA, 25 bp, Probe sequence
ggtgtgaaactcggctgtattaatc

SEQ ID NO: 280709 - DNA, 25 bp, Probe sequence
ggagagatcccctggcttgcagaaa

SEQ ID NO: 280710 - DNA, 25 bp, Probe sequence
ggaacaactgccggtgatactggta

SEQ ID NO: 280711 - DNA, 25 bp, Probe sequence
ggaaaacgtcacgctgaatatatga

SEQ ID NO: 280712 - DNA, 25 bp, Probe sequence
ggctggtttacgccgctttctgaca

SEQ ID NO: 280713 - DNA, 25 bp, Probe sequence
ggctgtattaatcacgcgatgttga

SEQ ID NO: 280714 - DNA, 25 bp, Probe sequence
tggcttgcagaaaatccagaaaatg

SEQ ID NO: 280715 - DNA, 25 bp, Probe sequence
tggtgtgaaactcggctgtattaat

SEQ ID NO: 280716 - DNA, 25 bp, Probe sequence
tgggagagatcccctggcttgcaga

SEQ ID NO: 280717 - DNA, 25 bp, Probe sequence
tgtgaaactcggctgtattaatcac

SEQ ID NO: 280718 - DNA, 25 bp, Probe sequence
tgtattaatcacgcgatgttgactg

SEQ ID NO: 280719 - DNA, 25 bp, Probe sequence
tgatactggtagttggtgtgaaact

SEQ ID NO: 280720 - DNA, 25 bp, Probe sequence
tgaaactcggctgtattaatcacgc

SEQ ID NO: 280721 - DNA, 25 bp, Probe sequence
tgacactttcacttttgcagattgg

SEQ ID NO: 280722 - DNA, 25 bp, Probe sequence
tgctggcggctggtttacgccgctt

SEQ ID NO: 280723 - DNA, 25 bp, Probe sequence
tgcacaggtaatacaacacgccgga

SEQ ID NO: 280724 - DNA, 25 bp, Probe sequence
tgctgggagagatcccctggcttgc

SEQ ID NO: 280725 - DNA, 25 bp, Probe sequence
tgccggtgatactggtagttggtgt

SEQ ID NO: 280726 - DNA, 25 bp, Probe sequence
tcggctgtattaatcacgcgatgtt

SEQ ID NO: 280727 - DNA, 25 bp, Probe sequence
tctgacactttcacttttgcagatt

SEQ ID NO: 280728 - DNA, 25 bp, Probe sequence
tcacttttgcagattgggtaacaca

SEQ ID NO: 280729 - DNA, 25 bp, Probe sequence
taatacaacacgccggactgactct

SEQ ID NO: 280730 - DNA, 25 bp, Probe sequence
taatcacgcgatgttgactgcacag

SEQ ID NO: 280731 - DNA, 25 bp, Probe sequence
tacaacacgccggactgactctggc

SEQ ID NO: 280732 - DNA, 25 bp, Probe sequence
taacacaggaacaactgccggtgat

SEQ ID NO: 280733 - DNA, 25 bp, Probe sequence
tacgccgctttctgacactttcact

SEQ ID NO: 280734 - DNA, 25 bp, Probe sequence
tatatgaccacgctcacccgcatga

SEQ ID NO: 280735 - DNA, 25 bp, Probe sequence
tattaatcacgcgatgttgactgca

SEQ ID NO: 280736 - DNA, 25 bp, Probe sequence
tttcacttttgcagattgggtaaca

SEQ ID NO: 280737 - DNA, 25 bp, Probe sequence
tttgcagattgggtaacacaggaac

SEQ ID NO: 280738 - DNA, 25 bp, Probe sequence
tttctgacactttcacttttgcaga

SEQ ID NO: 280739 - DNA, 25 bp, Probe sequence
tttacgccgctttctgacactttca

SEQ ID NO: 280740 - DNA, 25 bp, Probe sequence
ttcacttttgcagattgggtaacac

SEQ ID NO: 280741 - DNA, 25 bp, Probe sequence
ttacgccgctttctgacactttcac

SEQ ID NO: 280742 - DNA, 25 bp, Probe sequence
ttaatcacgcgatgttgactgcaca

SEQ ID NO: 280743 - DNA, 25 bp, Probe sequence
ttctgacactttcacttttgcagat

SEQ ID NO: 280744 - DNA, 25 bp, Probe sequence
ttggtgtgaaactcggctgtattaa

SEQ ID NO: 280745 - DNA, 25 bp, Probe sequence
ttgactgcacaggtaatacaacacg

SEQ ID NO: 280746 - DNA, 25 bp, Probe sequence
gggaaaactgtcgccagttgtgcac

SEQ ID NO: 280747 - DNA, 25 bp, Probe sequence
aaaggcagcaggctaccggacggca

SEQ ID NO: 280748 - DNA, 25 bp, Probe sequence
cttttacaagccgcaaaggcagcag

SEQ ID NO: 280749 - DNA, 25 bp, Probe sequence
ccgcaaaggcagcaggctaccggac

SEQ ID NO: 280750 - DNA, 25 bp, Probe sequence
atagcgacgcgctggcgttacagcg

SEQ ID NO: 280751 - DNA, 25 bp, Probe sequence
atcagcgcgcaagagggcagaccga

SEQ ID NO: 280752 - DNA, 25 bp, Probe sequence
atcatcagcgcgcaagagggcagac

SEQ ID NO: 280753 - DNA, 25 bp, Probe sequence
aggtttacgcaatagcgacgcgctg

SEQ ID NO: 280754 - DNA, 25 bp, Probe sequence
agttgtgcacttttacaagccgcaa

SEQ ID NO: 280755 - DNA, 25 bp, Probe sequence
agctggattacgcaacagtaaatcc

SEQ ID NO: 280756 - DNA, 25 bp, Probe sequence
agcagcctgcagctggattacgcaa

SEQ ID NO: 280757 - DNA, 25 bp, Probe sequence
agcgacgcgctggcgttacagcgca

SEQ ID NO: 280758 - DNA, 25 bp, Probe sequence
agccgcaaaggcagcaggctaccgg

SEQ ID NO: 280759 - DNA, 25 bp, Probe sequence
cagcgcaacagcagcctgcagctgg

SEQ ID NO: 280760 - DNA, 25 bp, Probe sequence
agcgcaacagcagcctgcagctgga

SEQ ID NO: 280761 - DNA, 25 bp, Probe sequence
agcgcgcaagagggcagaccgatag

SEQ ID NO: 280762 - DNA, 25 bp, Probe sequence
agcctgcagctggattacgcaacag

SEQ ID NO: 280763 - DNA, 25 bp, Probe sequence
acgcgctggcgttacagcgcaacag

SEQ ID NO: 280764 - DNA, 25 bp, Probe sequence
acgcaatagcgacgcgctggcgtta

SEQ ID NO: 280765 - DNA, 25 bp, Probe sequence
acagcagcctgcagctggattacgc

SEQ ID NO: 280766 - DNA, 25 bp, Probe sequence
actgtcgccagttgtgcacttttac

SEQ ID NO: 280767 - DNA, 25 bp, Probe sequence
acatcatcagcgcgcaagagggcag

SEQ ID NO: 280768 - DNA, 25 bp, Probe sequence
acttttacaagccgcaaaggcagca

SEQ ID NO: 280769 - DNA, 25 bp, Probe sequence
acagcgcaacagcagcctgcagctg

SEQ ID NO: 280770 - DNA, 25 bp, Probe sequence
acaagccgcaaaggcagcaggctac

SEQ ID NO: 280771 - DNA, 25 bp, Probe sequence
caaaggcagcaggctaccggacggc

SEQ ID NO: 280772 - DNA, 25 bp, Probe sequence
aacagcagcctgcagctggattacg

SEQ ID NO: 280773 - DNA, 25 bp, Probe sequence
aactgtcgccagttgtgcactttta

SEQ ID NO: 280774 - DNA, 25 bp, Probe sequence
aagccgcaaaggcagcaggctaccg

SEQ ID NO: 280775 - DNA, 25 bp, Probe sequence
caagccgcaaaggcagcaggctacc

SEQ ID NO: 280776 - DNA, 25 bp, Probe sequence
aaggcagcaggctaccggacggcag

SEQ ID NO: 280777 - DNA, 25 bp, Probe sequence
aatagcgacgcgctggcgttacagc

SEQ ID NO: 280778 - DNA, 25 bp, Probe sequence
caatagcgacgcgctggcgttacag

SEQ ID NO: 280779 - DNA, 25 bp, Probe sequence
caacagcagcctgcagctggattac

SEQ ID NO: 280780 - DNA, 25 bp, Probe sequence
cacttttacaagccgcaaaggcagc

SEQ ID NO: 280781 - DNA, 25 bp, Probe sequence
cacatcatcagcgcgcaagagggca

SEQ ID NO: 280782 - DNA, 25 bp, Probe sequence
cagcgcgcaagagggcagaccgata

SEQ ID NO: 280783 - DNA, 25 bp, Probe sequence
catcatcagcgcgcaagagggcaga

SEQ ID NO: 280784 - DNA, 25 bp, Probe sequence
gcagcaggctaccggacggcaggtt

SEQ ID NO: 280785 - DNA, 25 bp, Probe sequence
cagctggattacgcaacagtaaatc

SEQ ID NO: 280786 - DNA, 25 bp, Probe sequence
cagcagcctgcagctggattacgca

SEQ ID NO: 280787 - DNA, 25 bp, Probe sequence
cagcctgcagctggattacgcaaca

SEQ ID NO: 280788 - DNA, 25 bp, Probe sequence
cagttgtgcacttttacaagccgca

SEQ ID NO: 280789 - DNA, 25 bp, Probe sequence
cagtaaatccttacaccttcgcaga

SEQ ID NO: 280790 - DNA, 25 bp, Probe sequence
catcagcgcgcaagagggcagaccg

SEQ ID NO: 280791 - DNA, 25 bp, Probe sequence
ctgcagctggattacgcaacagtaa

SEQ ID NO: 280792 - DNA, 25 bp, Probe sequence
ctgtcgccagttgtgcacttttaca

SEQ ID NO: 280793 - DNA, 25 bp, Probe sequence
ctggcgttacagcgcaacagcagcc

SEQ ID NO: 280794 - DNA, 25 bp, Probe sequence
cggtcgcctctggcagcgaaaagac

SEQ ID NO: 280795 - DNA, 25 bp, Probe sequence
cgcaaaggcagcaggctaccggacg

SEQ ID NO: 280796 - DNA, 25 bp, Probe sequence
cgacgcgctggcgttacagcgcaac

SEQ ID NO: 280797 - DNA, 25 bp, Probe sequence
cgttacagcgcaacagcagcctgca

SEQ ID NO: 280798 - DNA, 25 bp, Probe sequence
cgcaatagcgacgcgctggcgttac

SEQ ID NO: 280799 - DNA, 25 bp, Probe sequence
cgcaacagcagcctgcagctggatt

SEQ ID NO: 280800 - DNA, 25 bp, Probe sequence
cgccagttgtgcacttttacaagcc

SEQ ID NO: 280801 - DNA, 25 bp, Probe sequence
cgcacatcatcagcgcgcaagaggg

SEQ ID NO: 280802 - DNA, 25 bp, Probe sequence
cgcgctggcgttacagcgcaacagc

SEQ ID NO: 280803 - DNA, 25 bp, Probe sequence
tcgcctctggcagcgaaaagacccc

SEQ ID NO: 280804 - DNA, 25 bp, Probe sequence
cgcgcaagagggcagaccgatagaa

SEQ ID NO: 280805 - DNA, 25 bp, Probe sequence
cgccgcacatcatcagcgcgcaaga

SEQ ID NO: 280806 - DNA, 25 bp, Probe sequence
ccgcacatcatcagcgcgcaagagg

SEQ ID NO: 280807 - DNA, 25 bp, Probe sequence
ccggtcgcctctggcagcgaaaaga

SEQ ID NO: 280808 - DNA, 25 bp, Probe sequence
cctgcagctggattacgcaacagta

SEQ ID NO: 280809 - DNA, 25 bp, Probe sequence
ccagttgtgcacttttacaagccgc

SEQ ID NO: 280810 - DNA, 25 bp, Probe sequence
gccagttgtgcacttttacaagccg

SEQ ID NO: 280811 - DNA, 25 bp, Probe sequence
gcctgcagctggattacgcaacagt

SEQ ID NO: 280812 - DNA, 25 bp, Probe sequence
gccgcaaaggcagcaggctaccgga

SEQ ID NO: 280813 - DNA, 25 bp, Probe sequence
gccgcacatcatcagcgcgcaagag

SEQ ID NO: 280814 - DNA, 25 bp, Probe sequence
gcgcgcaagagggcagaccgataga

SEQ ID NO: 280815 - DNA, 25 bp, Probe sequence
gcgctggcgttacagcgcaacagca

SEQ ID NO: 280816 - DNA, 25 bp, Probe sequence
gcgcaacagcagcctgcagctggat

SEQ ID NO: 280817 - DNA, 25 bp, Probe sequence
gcgttacagcgcaacagcagcctgc

SEQ ID NO: 280818 - DNA, 25 bp, Probe sequence
gcgacgcgctggcgttacagcgcaa

SEQ ID NO: 280819 - DNA, 25 bp, Probe sequence
gctggattacgcaacagtaaatcct

SEQ ID NO: 280820 - DNA, 25 bp, Probe sequence
gcaggctaccggacggcaggttata

SEQ ID NO: 280821 - DNA, 25 bp, Probe sequence
gcagcctgcagctggattacgcaac

SEQ ID NO: 280822 - DNA, 25 bp, Probe sequence
gcacttttacaagccgcaaaggcag

SEQ ID NO: 280823 - DNA, 25 bp, Probe sequence
gcacatcatcagcgcgcaagagggc

SEQ ID NO: 280824 - DNA, 25 bp, Probe sequence
gcagctggattacgcaacagtaaat

SEQ ID NO: 280825 - DNA, 25 bp, Probe sequence
gcaaaggcagcaggctaccggacgg

SEQ ID NO: 280826 - DNA, 25 bp, Probe sequence
gcaacagcagcctgcagctggatta

SEQ ID NO: 280827 - DNA, 25 bp, Probe sequence
gcaatagcgacgcgctggcgttaca

SEQ ID NO: 280828 - DNA, 25 bp, Probe sequence
gacgcgctggcgttacagcgcaaca

SEQ ID NO: 280829 - DNA, 25 bp, Probe sequence
cagcaggctaccggacggcaggtta

SEQ ID NO: 280830 - DNA, 25 bp, Probe sequence
gattacgcaacagtaaatccttaca

SEQ ID NO: 280831 - DNA, 25 bp, Probe sequence
gttgtgcacttttacaagccgcaaa

SEQ ID NO: 280832 - DNA, 25 bp, Probe sequence
gttacagcgcaacagcagcctgcag

SEQ ID NO: 280833 - DNA, 25 bp, Probe sequence
gtttacgcaatagcgacgcgctggc

SEQ ID NO: 280834 - DNA, 25 bp, Probe sequence
gtcgccagttgtgcacttttacaag

SEQ ID NO: 280835 - DNA, 25 bp, Probe sequence
gtcgcctctggcagcgaaaagaccc

SEQ ID NO: 280836 - DNA, 25 bp, Probe sequence
gtgcacttttacaagccgcaaaggc

SEQ ID NO: 280837 - DNA, 25 bp, Probe sequence
ggggaaaactgtcgccagttgtgca

SEQ ID NO: 280838 - DNA, 25 bp, Probe sequence
ggtcgcctctggcagcgaaaagacc

SEQ ID NO: 280839 - DNA, 25 bp, Probe sequence
ggtttacgcaatagcgacgcgctgg

SEQ ID NO: 280840 - DNA, 25 bp, Probe sequence
ggaaaactgtcgccagttgtgcact

SEQ ID NO: 280841 - DNA, 25 bp, Probe sequence
ggcgttacagcgcaacagcagcctg

SEQ ID NO: 280842 - DNA, 25 bp, Probe sequence
tggcgttacagcgcaacagcagcct

SEQ ID NO: 280843 - DNA, 25 bp, Probe sequence
tgtgcacttttacaagccgcaaagg

SEQ ID NO: 280844 - DNA, 25 bp, Probe sequence
tgtcgccagttgtgcacttttacaa

SEQ ID NO: 280845 - DNA, 25 bp, Probe sequence
tgcacttttacaagccgcaaaggca

SEQ ID NO: 280846 - DNA, 25 bp, Probe sequence
tgcagctggattacgcaacagtaaa

SEQ ID NO: 280847 - DNA, 25 bp, Probe sequence
tcgccagttgtgcacttttacaagc

SEQ ID NO: 280848 - DNA, 25 bp, Probe sequence
tcgccgcacatcatcagcgcgcaag

SEQ ID NO: 280849 - DNA, 25 bp, Probe sequence
tcatcagcgcgcaagagggcagacc

SEQ ID NO: 280850 - DNA, 25 bp, Probe sequence
tagcgacgcgctggcgttacagcgc

SEQ ID NO: 280851 - DNA, 25 bp, Probe sequence
tcagcgcgcaagagggcagaccgat

SEQ ID NO: 280852 - DNA, 25 bp, Probe sequence
ttacagcgcaacagcagcctgcagc

SEQ ID NO: 280853 - DNA, 25 bp, Probe sequence
tataaaccggtcgcctctggcagcg

SEQ ID NO: 280854 - DNA, 25 bp, Probe sequence
ttataaaccggtcgcctctggcagc

SEQ ID NO: 280855 - DNA, 25 bp, Probe sequence
taaaccggtcgcctctggcagcgaa

SEQ ID NO: 280856 - DNA, 25 bp, Probe sequence
tacaagccgcaaaggcagcaggcta

SEQ ID NO: 280857 - DNA, 25 bp, Probe sequence
tacagcgcaacagcagcctgcagct

SEQ ID NO: 280858 - DNA, 25 bp, Probe sequence
tacgcaatagcgacgcgctggcgtt

SEQ ID NO: 280859 - DNA, 25 bp, Probe sequence
ttacaagccgcaaaggcagcaggct

SEQ ID NO: 280860 - DNA, 25 bp, Probe sequence
tttacaagccgcaaaggcagcaggc

SEQ ID NO: 280861 - DNA, 25 bp, Probe sequence
tttacgcaatagcgacgcgctggcg

SEQ ID NO: 280862 - DNA, 25 bp, Probe sequence
ttttacaagccgcaaaggcagcagg

SEQ ID NO: 280863 - DNA, 25 bp, Probe sequence
ttacgcaatagcgacgcgctggcgt

SEQ ID NO: 280864 - DNA, 25 bp, Probe sequence
ttcgccgcacatcatcagcgcgcaa

SEQ ID NO: 280865 - DNA, 25 bp, Probe sequence
ttgtgcacttttacaagccgcaaag

SEQ ID NO: 280866 - DNA, 25 bp, Probe sequence
atatggcccgcgctggagtttcaat

SEQ ID NO: 280867 - DNA, 25 bp, Probe sequence
atttccgtctctggtgtagctgatg

SEQ ID NO: 280868 - DNA, 25 bp, Probe sequence
atcatgcaagctggtggctggacca

SEQ ID NO: 280869 - DNA, 25 bp, Probe sequence
atacctggcctggtctggacacagt

SEQ ID NO: 280870 - DNA, 25 bp, Probe sequence
atccatattggcagaacgaaaacgc

SEQ ID NO: 280871 - DNA, 25 bp, Probe sequence
atgcaagctggtggctggaccaatg

SEQ ID NO: 280872 - DNA, 25 bp, Probe sequence
atggtgcgcctgctggaagatgccg

SEQ ID NO: 280873 - DNA, 25 bp, Probe sequence
atggatttccgtctctggtgtagct

SEQ ID NO: 280874 - DNA, 25 bp, Probe sequence
atggcccgcgctggagtttcaatac

SEQ ID NO: 280875 - DNA, 25 bp, Probe sequence
agatatggcccgcgctggagtttca

SEQ ID NO: 280876 - DNA, 25 bp, Probe sequence
agtttcaataccggagatcatgcaa

SEQ ID NO: 280877 - DNA, 25 bp, Probe sequence
agatcatgcaagctggtggctggac

SEQ ID NO: 280878 - DNA, 25 bp, Probe sequence
agaatgttaatccatattggcagaa

SEQ ID NO: 280879 - DNA, 25 bp, Probe sequence
agcaactcatcgattgatttacggc

SEQ ID NO: 280880 - DNA, 25 bp, Probe sequence
agcgatggatttccgtctctggtgt

SEQ ID NO: 280881 - DNA, 25 bp, Probe sequence
agctggtggctggaccaatgtaaat

SEQ ID NO: 280882 - DNA, 25 bp, Probe sequence
tggtgttgccgcgccatctgccacc

SEQ ID NO: 280883 - DNA, 25 bp, Probe sequence
actctggtcagagatacctggcctg

SEQ ID NO: 280884 - DNA, 25 bp, Probe sequence
actatatccgtaacctggatagtga

SEQ ID NO: 280885 - DNA, 25 bp, Probe sequence
cacagtgcccgtgtcggagccgcgc

SEQ ID NO: 280886 - DNA, 25 bp, Probe sequence
acagtgcccgtgtcggagccgcgcg

SEQ ID NO: 280887 - DNA, 25 bp, Probe sequence
aacaggggcaatggtgcgcctgctg

SEQ ID NO: 280888 - DNA, 25 bp, Probe sequence
aactcatcgattgatttacggcgct

SEQ ID NO: 280889 - DNA, 25 bp, Probe sequence
aacgctggttagcaccgcaggtgta

SEQ ID NO: 280890 - DNA, 25 bp, Probe sequence
aatggtgttgccgcgccatctgcca

SEQ ID NO: 280891 - DNA, 25 bp, Probe sequence
aataccggagatcatgcaagctggt

SEQ ID NO: 280892 - DNA, 25 bp, Probe sequence
aatattgtcatgaactatatccgta

SEQ ID NO: 280893 - DNA, 25 bp, Probe sequence
caagctggtggctggaccaatgtaa

SEQ ID NO: 280894 - DNA, 25 bp, Probe sequence
caatggtgcgcctgctggaagatgc

SEQ ID NO: 280895 - DNA, 25 bp, Probe sequence
caccgcaggtgtagagaaggcactt

SEQ ID NO: 280896 - DNA, 25 bp, Probe sequence
cagctatcaactcgcgccctggaag

SEQ ID NO: 280897 - DNA, 25 bp, Probe sequence
cagagatacctggcctggtctggac

SEQ ID NO: 280898 - DNA, 25 bp, Probe sequence
catcgattgatttacggcgctaagg

SEQ ID NO: 280899 - DNA, 25 bp, Probe sequence
catgaactatatccgtaacctggat

SEQ ID NO: 280900 - DNA, 25 bp, Probe sequence
ctatatccgtaacctggatagtgaa

SEQ ID NO: 280901 - DNA, 25 bp, Probe sequence
ctcatcgattgatttacggcgctaa

SEQ ID NO: 280902 - DNA, 25 bp, Probe sequence
ctaaactggtcgagcgatggatttc

SEQ ID NO: 280903 - DNA, 25 bp, Probe sequence
ctggagtttcaataccggagatcat

SEQ ID NO: 280904 - DNA, 25 bp, Probe sequence
ctctggtgtagctgatgatccgaat

SEQ ID NO: 280905 - DNA, 25 bp, Probe sequence
ctggtcagagatacctggcctggtc

SEQ ID NO: 280906 - DNA, 25 bp, Probe sequence
cggagccgcgcgagatatggcccgc

SEQ ID NO: 280907 - DNA, 25 bp, Probe sequence
cggagatcatgcaagctggtggctg

SEQ ID NO: 280908 - DNA, 25 bp, Probe sequence
ctggtctggacacagtgcccgtgtc

SEQ ID NO: 280909 - DNA, 25 bp, Probe sequence
cgcgagatatggcccgcgctggagt

SEQ ID NO: 280910 - DNA, 25 bp, Probe sequence
cggcgctaaggatgactctggtcag

SEQ ID NO: 280911 - DNA, 25 bp, Probe sequence
cgtctctggtgtagctgatgatccg

SEQ ID NO: 280912 - DNA, 25 bp, Probe sequence
cgagcgatggatttccgtctctggt

SEQ ID NO: 280913 - DNA, 25 bp, Probe sequence
cgagatatggcccgcgctggagttt

SEQ ID NO: 280914 - DNA, 25 bp, Probe sequence
cgcgcgagatatggcccgcgctgga

SEQ ID NO: 280915 - DNA, 25 bp, Probe sequence
cgctggttagcaccgcaggtgtaga

SEQ ID NO: 280916 - DNA, 25 bp, Probe sequence
cgctggagtttcaataccggagatc

SEQ ID NO: 280917 - DNA, 25 bp, Probe sequence
ccggagatcatgcaagctggtggct

SEQ ID NO: 280918 - DNA, 25 bp, Probe sequence
ccgtgtcggagccgcgcgagatatg

SEQ ID NO: 280919 - DNA, 25 bp, Probe sequence
gcctggtctggacacagtgcccgtg

SEQ ID NO: 280920 - DNA, 25 bp, Probe sequence
gccagctatcaactcgcgccctgga

SEQ ID NO: 280921 - DNA, 25 bp, Probe sequence
gcgcctgctggaagatgccgattag

SEQ ID NO: 280922 - DNA, 25 bp, Probe sequence
gcgctaaggatgactctggtcagag

SEQ ID NO: 280923 - DNA, 25 bp, Probe sequence
gctgatgatccgaataactacctgt

SEQ ID NO: 280924 - DNA, 25 bp, Probe sequence
gctaaggatgactctggtcagagat

SEQ ID NO: 280925 - DNA, 25 bp, Probe sequence
gcaactcatcgattgatttacggcg

SEQ ID NO: 280926 - DNA, 25 bp, Probe sequence
gaatgttaatccatattggcagaac

SEQ ID NO: 280927 - DNA, 25 bp, Probe sequence
gacacagtgcccgtgtcggagccgc

SEQ ID NO: 280928 - DNA, 25 bp, Probe sequence
gatacctggcctggtctggacacag

SEQ ID NO: 280929 - DNA, 25 bp, Probe sequence
gaaacaggggcaatggtgcgcctgc

SEQ ID NO: 280930 - DNA, 25 bp, Probe sequence
gagccgcgcgagatatggcccgcgc

SEQ ID NO: 280931 - DNA, 25 bp, Probe sequence
gagatacctggcctggtctggacac

SEQ ID NO: 280932 - DNA, 25 bp, Probe sequence
gtcagagatacctggcctggtctgg

SEQ ID NO: 280933 - DNA, 25 bp, Probe sequence
gatttacggcgctaaggatgactct

SEQ ID NO: 280934 - DNA, 25 bp, Probe sequence
gatttttgaagcaactcatcgattg

SEQ ID NO: 280935 - DNA, 25 bp, Probe sequence
gattgatttacggcgctaaggatga

SEQ ID NO: 280936 - DNA, 25 bp, Probe sequence
gttaatccatattggcagaacgaaa

SEQ ID NO: 280937 - DNA, 25 bp, Probe sequence
gtcatgaactatatccgtaacctgg

SEQ ID NO: 280938 - DNA, 25 bp, Probe sequence
gtaactaaactggtcgagcgatgga

SEQ ID NO: 280939 - DNA, 25 bp, Probe sequence
ggtctggacacagtgcccgtgtcgg

SEQ ID NO: 280940 - DNA, 25 bp, Probe sequence
gtcgagcgatggatttccgtctctg

SEQ ID NO: 280941 - DNA, 25 bp, Probe sequence
gtctctggtgtagctgatgatccga

SEQ ID NO: 280942 - DNA, 25 bp, Probe sequence
gtcggagccgcgcgagatatggccc

SEQ ID NO: 280943 - DNA, 25 bp, Probe sequence
ggtgcgcctgctggaagatgccgat

SEQ ID NO: 280944 - DNA, 25 bp, Probe sequence
ggttagcaccgcaggtgtagagaag

SEQ ID NO: 280945 - DNA, 25 bp, Probe sequence
ggatttccgtctctggtgtagctga

SEQ ID NO: 280946 - DNA, 25 bp, Probe sequence
ggcaatggtgcgcctgctggaagat

SEQ ID NO: 280947 - DNA, 25 bp, Probe sequence
tggcccgcgctggagtttcaatacc

SEQ ID NO: 280948 - DNA, 25 bp, Probe sequence
tggtcgagcgatggatttccgtctc

SEQ ID NO: 280949 - DNA, 25 bp, Probe sequence
tggatttccgtctctggtgtagctg

SEQ ID NO: 280950 - DNA, 25 bp, Probe sequence
tggttagcaccgcaggtgtagagaa

SEQ ID NO: 280951 - DNA, 25 bp, Probe sequence
tggacacagtgcccgtgtcggagcc

SEQ ID NO: 280952 - DNA, 25 bp, Probe sequence
tttacggcgctaaggatgactctgg

SEQ ID NO: 280953 - DNA, 25 bp, Probe sequence
tgtagctgatgatccgaataactac

SEQ ID NO: 280954 - DNA, 25 bp, Probe sequence
tgactctggtcagagatacctggcc

SEQ ID NO: 280955 - DNA, 25 bp, Probe sequence
tgatgatccgaataactacctgttt

SEQ ID NO: 280956 - DNA, 25 bp, Probe sequence
tgcaagctggtggctggaccaatgt

SEQ ID NO: 280957 - DNA, 25 bp, Probe sequence
tgaactatatccgtaacctggatag

SEQ ID NO: 280958 - DNA, 25 bp, Probe sequence
tgcgcctgctggaagatgccgatta

SEQ ID NO: 280959 - DNA, 25 bp, Probe sequence
tctggtcagagatacctggcctggt

SEQ ID NO: 280960 - DNA, 25 bp, Probe sequence
tcgattgatttacggcgctaaggat

SEQ ID NO: 280961 - DNA, 25 bp, Probe sequence
tctggacacagtgcccgtgtcggag

SEQ ID NO: 280962 - DNA, 25 bp, Probe sequence
tacggcgctaaggatgactctggtc

SEQ ID NO: 280963 - DNA, 25 bp, Probe sequence
tcaataccggagatcatgcaagctg

SEQ ID NO: 280964 - DNA, 25 bp, Probe sequence
taaggatgactctggtcagagatac

SEQ ID NO: 280965 - DNA, 25 bp, Probe sequence
taatccatattggcagaacgaaaac

SEQ ID NO: 280966 - DNA, 25 bp, Probe sequence
ttagcaccgcaggtgtagagaaggc

SEQ ID NO: 280967 - DNA, 25 bp, Probe sequence
tattgtcatgaactatatccgtaac

SEQ ID NO: 280968 - DNA, 25 bp, Probe sequence
tttgaagcaactcatcgattgattt

SEQ ID NO: 280969 - DNA, 25 bp, Probe sequence
tttcaataccggagatcatgcaagc

SEQ ID NO: 280970 - DNA, 25 bp, Probe sequence
tttttgaagcaactcatcgattgat

SEQ ID NO: 280971 - DNA, 25 bp, Probe sequence
ttttgaagcaactcatcgattgatt

SEQ ID NO: 280972 - DNA, 25 bp, Probe sequence
ttgatttacggcgctaaggatgact

SEQ ID NO: 280973 - DNA, 25 bp, Probe sequence
ttcaataccggagatcatgcaagct

SEQ ID NO: 280974 - DNA, 25 bp, Probe sequence
ttccgtctctggtgtagctgatgat

SEQ ID NO: 280975 - DNA, 25 bp, Probe sequence
ttgtcatgaactatatccgtaacct

SEQ ID NO: 280976 - DNA, 25 bp, Probe sequence
tcgtcggtccgggctgccacgacca

SEQ ID NO: 280977 - DNA, 25 bp, Probe sequence
attaccggtcgatgcaacgagtgat

SEQ ID NO: 280978 - DNA, 25 bp, Probe sequence
attatcttctatatcttcaggcgcg

SEQ ID NO: 280979 - DNA, 25 bp, Probe sequence
atttgcctgcattaccggtcgatgc

SEQ ID NO: 280980 - DNA, 25 bp, Probe sequence
atcttctatatcttcaggcgcgcgg

SEQ ID NO: 280981 - DNA, 25 bp, Probe sequence
atgcttcatcgtcggtccgggctgc

SEQ ID NO: 280982 - DNA, 25 bp, Probe sequence
atgttcgcgattatcttctatatct

SEQ ID NO: 280983 - DNA, 25 bp, Probe sequence
atggacatgttcagggatcgccagg

SEQ ID NO: 280984 - DNA, 25 bp, Probe sequence
aggttcgcaagaacctgatggacat

SEQ ID NO: 280985 - DNA, 25 bp, Probe sequence
agaacctgatggacatgttcaggga

SEQ ID NO: 280986 - DNA, 25 bp, Probe sequence
agctaaacatgcttcatcgtcggtc

SEQ ID NO: 280987 - DNA, 25 bp, Probe sequence
acctgatggacatgttcagggatcg

SEQ ID NO: 280988 - DNA, 25 bp, Probe sequence
agcgttcgaacgcactgatttcgac

SEQ ID NO: 280989 - DNA, 25 bp, Probe sequence
actatccagcaacatttgggccagc

SEQ ID NO: 280990 - DNA, 25 bp, Probe sequence
acctgaagatgttcgcgattatctt

SEQ ID NO: 280991 - DNA, 25 bp, Probe sequence
acgttgatgccggtgaacgtgcaaa

SEQ ID NO: 280992 - DNA, 25 bp, Probe sequence
acgaccaagtgacagcaatgctgtt

SEQ ID NO: 280993 - DNA, 25 bp, Probe sequence
acgtgcaaaacaggctctagcgttc

SEQ ID NO: 280994 - DNA, 25 bp, Probe sequence
cactgatttcgaccaggttcgttca

SEQ ID NO: 280995 - DNA, 25 bp, Probe sequence
acatgcttcatcgtcggtccgggct

SEQ ID NO: 280996 - DNA, 25 bp, Probe sequence
acatttgggccagctaaacatgctt

SEQ ID NO: 280997 - DNA, 25 bp, Probe sequence
aacaggctctagcgttcgaacgcac

SEQ ID NO: 280998 - DNA, 25 bp, Probe sequence
aacatgcttcatcgtcggtccgggc

SEQ ID NO: 280999 - DNA, 25 bp, Probe sequence
aatgctgtttcactggttatgcggc

SEQ ID NO: 281000 - DNA, 25 bp, Probe sequence
aatagcgatcgctgccaggatatac

SEQ ID NO: 281001 - DNA, 25 bp, Probe sequence
aatttgcctgcattaccggtcgatg

SEQ ID NO: 281002 - DNA, 25 bp, Probe sequence
caggcgcgcggtctggcagtaaaaa

SEQ ID NO: 281003 - DNA, 25 bp, Probe sequence
catgttcagggatcgccaggcgttt

SEQ ID NO: 281004 - DNA, 25 bp, Probe sequence
cagcaacatttgggccagctaaaca

SEQ ID NO: 281005 - DNA, 25 bp, Probe sequence
cagcaatgctgtttcactggttatg

SEQ ID NO: 281006 - DNA, 25 bp, Probe sequence
cagggatcgccaggcgttttctgag

SEQ ID NO: 281007 - DNA, 25 bp, Probe sequence
cttcaggcgcgcggtctggcagtaa

SEQ ID NO: 281008 - DNA, 25 bp, Probe sequence
ctatatcttcaggcgcgcggtctgg

SEQ ID NO: 281009 - DNA, 25 bp, Probe sequence
tcatcgtcggtccgggctgccacga

SEQ ID NO: 281010 - DNA, 25 bp, Probe sequence
ctgtttcactggttatgcggcggat

SEQ ID NO: 281011 - DNA, 25 bp, Probe sequence
ctgcattaccggtcgatgcaacgag

SEQ ID NO: 281012 - DNA, 25 bp, Probe sequence
ctgatggacatgttcagggatcgcc

SEQ ID NO: 281013 - DNA, 25 bp, Probe sequence
cgttcactcatggaaaatagcgatc

SEQ ID NO: 281014 - DNA, 25 bp, Probe sequence
cgaccaggttcgttcactcatggaa

SEQ ID NO: 281015 - DNA, 25 bp, Probe sequence
cgaccaagtgacagcaatgctgttt

SEQ ID NO: 281016 - DNA, 25 bp, Probe sequence
cgagtgatgaggttcgcaagaacct

SEQ ID NO: 281017 - DNA, 25 bp, Probe sequence
ccgggctgccacgaccaagtgacag

SEQ ID NO: 281018 - DNA, 25 bp, Probe sequence
ccaggcgttttctgagcatacctgg

SEQ ID NO: 281019 - DNA, 25 bp, Probe sequence
ccagctaaacatgcttcatcgtcgg

SEQ ID NO: 281020 - DNA, 25 bp, Probe sequence
gccaggcgttttctgagcatacctg

SEQ ID NO: 281021 - DNA, 25 bp, Probe sequence
ccaagtgacagcaatgctgtttcac

SEQ ID NO: 281022 - DNA, 25 bp, Probe sequence
gcgatcgctgccaggatatacgtaa

SEQ ID NO: 281023 - DNA, 25 bp, Probe sequence
gctgtttcactggttatgcggcgga

SEQ ID NO: 281024 - DNA, 25 bp, Probe sequence
gcttcatcgtcggtccgggctgcca

SEQ ID NO: 281025 - DNA, 25 bp, Probe sequence
gctgccacgaccaagtgacagcaat

SEQ ID NO: 281026 - DNA, 25 bp, Probe sequence
gcatttctggggattgcttataaca

SEQ ID NO: 281027 - DNA, 25 bp, Probe sequence
gcattaccggtcgatgcaacgagtg

SEQ ID NO: 281028 - DNA, 25 bp, Probe sequence
gcatacctggaaaatgcttctgtcc

SEQ ID NO: 281029 - DNA, 25 bp, Probe sequence
gcagtaaaaactatccagcaacatt

SEQ ID NO: 281030 - DNA, 25 bp, Probe sequence
gcactgatttcgaccaggttcgttc

SEQ ID NO: 281031 - DNA, 25 bp, Probe sequence
gcaacatttgggccagctaaacatg

SEQ ID NO: 281032 - DNA, 25 bp, Probe sequence
gcaatgctgtttcactggttatgcg

SEQ ID NO: 281033 - DNA, 25 bp, Probe sequence
gaagatgttcgcgattatcttctat

SEQ ID NO: 281034 - DNA, 25 bp, Probe sequence
gacatgttcagggatcgccaggcgt

SEQ ID NO: 281035 - DNA, 25 bp, Probe sequence
gaacctgaagatgttcgcgattatc

SEQ ID NO: 281036 - DNA, 25 bp, Probe sequence
gacagcaatgctgtttcactggtta

SEQ ID NO: 281037 - DNA, 25 bp, Probe sequence
gaccaggttcgttcactcatggaaa

SEQ ID NO: 281038 - DNA, 25 bp, Probe sequence
gaccgtacaccaaaatttgcctgca

SEQ ID NO: 281039 - DNA, 25 bp, Probe sequence
gaccaagtgacagcaatgctgtttc

SEQ ID NO: 281040 - DNA, 25 bp, Probe sequence
gagcatacctggaaaatgcttctgt

SEQ ID NO: 281041 - DNA, 25 bp, Probe sequence
gatcgctgccaggatatacgtaatc

SEQ ID NO: 281042 - DNA, 25 bp, Probe sequence
gatcgccaggcgttttctgagcata

SEQ ID NO: 281043 - DNA, 25 bp, Probe sequence
gatttcgaccaggttcgttcactca

SEQ ID NO: 281044 - DNA, 25 bp, Probe sequence
gattatcttctatatcttcaggcgc

SEQ ID NO: 281045 - DNA, 25 bp, Probe sequence
gttcgcaagaacctgatggacatgt

SEQ ID NO: 281046 - DNA, 25 bp, Probe sequence
gttcgcgattatcttctatatcttc

SEQ ID NO: 281047 - DNA, 25 bp, Probe sequence
gtttcactggttatgcggcggatcc

SEQ ID NO: 281048 - DNA, 25 bp, Probe sequence
gtcgatgcaacgagtgatgaggttc

SEQ ID NO: 281049 - DNA, 25 bp, Probe sequence
gtgcaaaacaggctctagcgttcga

SEQ ID NO: 281050 - DNA, 25 bp, Probe sequence
gggccagctaaacatgcttcatcgt

SEQ ID NO: 281051 - DNA, 25 bp, Probe sequence
gggctgccacgaccaagtgacagca

SEQ ID NO: 281052 - DNA, 25 bp, Probe sequence
gggatcgccaggcgttttctgagca

SEQ ID NO: 281053 - DNA, 25 bp, Probe sequence
ggtcgatgcaacgagtgatgaggtt

SEQ ID NO: 281054 - DNA, 25 bp, Probe sequence
ggctctagcgttcgaacgcactgat

SEQ ID NO: 281055 - DNA, 25 bp, Probe sequence
ggctgccacgaccaagtgacagcaa

SEQ ID NO: 281056 - DNA, 25 bp, Probe sequence
ggcgttttctgagcatacctggaaa

SEQ ID NO: 281057 - DNA, 25 bp, Probe sequence
ggccagctaaacatgcttcatcgtc

SEQ ID NO: 281058 - DNA, 25 bp, Probe sequence
ttgcctgcattaccggtcgatgcaa

SEQ ID NO: 281059 - DNA, 25 bp, Probe sequence
tggttatgcggcggatccgaaaaga

SEQ ID NO: 281060 - DNA, 25 bp, Probe sequence
tgggcggcatggtgcaagttgaata

SEQ ID NO: 281061 - DNA, 25 bp, Probe sequence
tgtccaatttactgaccgtacacca

SEQ ID NO: 281062 - DNA, 25 bp, Probe sequence
tgggccagctaaacatgcttcatcg

SEQ ID NO: 281063 - DNA, 25 bp, Probe sequence
tgatgccggtgaacgtgcaaaacag

SEQ ID NO: 281064 - DNA, 25 bp, Probe sequence
tgcattaccggtcgatgcaacgagt

SEQ ID NO: 281065 - DNA, 25 bp, Probe sequence
tcccgcagaacctgaagatgttcgc

SEQ ID NO: 281066 - DNA, 25 bp, Probe sequence
tgccacgaccaagtgacagcaatgc

SEQ ID NO: 281067 - DNA, 25 bp, Probe sequence
tccagcaacatttgggccagctaaa

SEQ ID NO: 281068 - DNA, 25 bp, Probe sequence
tcgcaagaacctgatggacatgttc

SEQ ID NO: 281069 - DNA, 25 bp, Probe sequence
tcgccaggcgttttctgagcatacc

SEQ ID NO: 281070 - DNA, 25 bp, Probe sequence
tcgttcactcatggaaaatagcgat

SEQ ID NO: 281071 - DNA, 25 bp, Probe sequence
tctatatcttcaggcgcgcggtctg

SEQ ID NO: 281072 - DNA, 25 bp, Probe sequence
tatccagcaacatttgggccagcta

SEQ ID NO: 281073 - DNA, 25 bp, Probe sequence
taccggtcgatgcaacgagtgatga

SEQ ID NO: 281074 - DNA, 25 bp, Probe sequence
tagcgttcgaacgcactgatttcga

SEQ ID NO: 281075 - DNA, 25 bp, Probe sequence
tagcgatcgctgccaggatatacgt

SEQ ID NO: 281076 - DNA, 25 bp, Probe sequence
tatatcttcaggcgcgcggtctggc

SEQ ID NO: 281077 - DNA, 25 bp, Probe sequence
tttctgagcatacctggaaaatgct

SEQ ID NO: 281078 - DNA, 25 bp, Probe sequence
ttcagggatcgccaggcgttttctg

SEQ ID NO: 281079 - DNA, 25 bp, Probe sequence
ttcgaacgcactgatttcgaccagg

SEQ ID NO: 281080 - DNA, 25 bp, Probe sequence
ttttctgagcatacctggaaaatgc

SEQ ID NO: 281081 - DNA, 25 bp, Probe sequence
ttcactggttatgcggcggatccga

SEQ ID NO: 281082 - DNA, 25 bp, Probe sequence
ttatcttctatatcttcaggcgcgc

SEQ ID NO: 281083 - DNA, 25 bp, Probe sequence
ttcccgcagaacctgaagatgttcg

SEQ ID NO: 281084 - DNA, 25 bp, Probe sequence
ttctgagcatacctggaaaatgctt

SEQ ID NO: 281085 - DNA, 25 bp, Probe sequence
ttgatgccggtgaacgtgcaaaaca

SEQ ID NO: 281086 - DNA, 25 bp, Probe sequence
gctaacgcttccagaccgcggccta

SEQ ID NO: 281087 - DNA, 25 bp, Probe sequence
tttctactcctctgacgaatgggta

SEQ ID NO: 281088 - DNA, 25 bp, Probe sequence
attgtcactgtcatcagaatctgtc

SEQ ID NO: 281089 - DNA, 25 bp, Probe sequence
attgatatctcggatacaatagagg

SEQ ID NO: 281090 - DNA, 25 bp, Probe sequence
atatgcgatttgacagaagcggaac

SEQ ID NO: 281091 - DNA, 25 bp, Probe sequence
attcggtcaattgtcactgtcatca

SEQ ID NO: 281092 - DNA, 25 bp, Probe sequence
attcagctaacgcttccagaccgcg

SEQ ID NO: 281093 - DNA, 25 bp, Probe sequence
atattgaaatcgttgaagcgagaga

SEQ ID NO: 281094 - DNA, 25 bp, Probe sequence
atatctcggatacaatagaggcaaa

SEQ ID NO: 281095 - DNA, 25 bp, Probe sequence
atcagaatctgtcggccaaaagcgg

SEQ ID NO: 281096 - DNA, 25 bp, Probe sequence
atcacggcaatgcggctgcactggt

SEQ ID NO: 281097 - DNA, 25 bp, Probe sequence
atcagccggattttgttattgatat

SEQ ID NO: 281098 - DNA, 25 bp, Probe sequence
atctcggatacaatagaggcaaaga

SEQ ID NO: 281099 - DNA, 25 bp, Probe sequence
atgcggctgcactggtggaagaagc

SEQ ID NO: 281100 - DNA, 25 bp, Probe sequence
atgcgatttgacagaagcggaactc

SEQ ID NO: 281101 - DNA, 25 bp, Probe sequence
atgatatgcgatttgacagaagcgg

SEQ ID NO: 281102 - DNA, 25 bp, Probe sequence
aggatcgccatccggatcacggcaa

SEQ ID NO: 281103 - DNA, 25 bp, Probe sequence
agtgatcaggcaattcggtcaattg

SEQ ID NO: 281104 - DNA, 25 bp, Probe sequence
agtcagcaaggtttactattatatg

SEQ ID NO: 281105 - DNA, 25 bp, Probe sequence
agaccgcggcctaataatgagtgat

SEQ ID NO: 281106 - DNA, 25 bp, Probe sequence
agaagcagctgaagcagcccgcata

SEQ ID NO: 281107 - DNA, 25 bp, Probe sequence
agaattcagctaacgcttccagacc

SEQ ID NO: 281108 - DNA, 25 bp, Probe sequence
agcagcccgcatattaggcgcagat

SEQ ID NO: 281109 - DNA, 25 bp, Probe sequence
agcagctgaagcagcccgcatatta

SEQ ID NO: 281110 - DNA, 25 bp, Probe sequence
agctgaagcagcccgcatattaggc

SEQ ID NO: 281111 - DNA, 25 bp, Probe sequence
agcccgcatattaggcgcagataaa

SEQ ID NO: 281112 - DNA, 25 bp, Probe sequence
accgcggcctaataatgagtgatca

SEQ ID NO: 281113 - DNA, 25 bp, Probe sequence
acggcaatgcggctgcactggtgga

SEQ ID NO: 281114 - DNA, 25 bp, Probe sequence
actgtcatcagaatctgtcggccaa

SEQ ID NO: 281115 - DNA, 25 bp, Probe sequence
actcctctgacgaatgggtatattg

SEQ ID NO: 281116 - DNA, 25 bp, Probe sequence
aagccttccggcgcataaagtcagc

SEQ ID NO: 281117 - DNA, 25 bp, Probe sequence
aaaggatcgccatccggatcacggc

SEQ ID NO: 281118 - DNA, 25 bp, Probe sequence
aagcagcccgcatattaggcgcaga

SEQ ID NO: 281119 - DNA, 25 bp, Probe sequence
aatgatatgcgatttgacagaagcg

SEQ ID NO: 281120 - DNA, 25 bp, Probe sequence
aatgcggctgcactggtggaagaag

SEQ ID NO: 281121 - DNA, 25 bp, Probe sequence
aattgtcactgtcatcagaatctgt

SEQ ID NO: 281122 - DNA, 25 bp, Probe sequence
caattcggtcaattgtcactgtcat

SEQ ID NO: 281123 - DNA, 25 bp, Probe sequence
cactgtcatcagaatctgtcggcca

SEQ ID NO: 281124 - DNA, 25 bp, Probe sequence
cagccggattttgttattgatatct

SEQ ID NO: 281125 - DNA, 25 bp, Probe sequence
cagaccgcggcctaataatgagtga

SEQ ID NO: 281126 - DNA, 25 bp, Probe sequence
catccggatcacggcaatgcggctg

SEQ ID NO: 281127 - DNA, 25 bp, Probe sequence
catcagaatctgtcggccaaaagcg

SEQ ID NO: 281128 - DNA, 25 bp, Probe sequence
catattaggcgcagataaaagaatt

SEQ ID NO: 281129 - DNA, 25 bp, Probe sequence
cttccggcgcataaagtcagcaagg

SEQ ID NO: 281130 - DNA, 25 bp, Probe sequence
cttccagaccgcggcctaataatga

SEQ ID NO: 281131 - DNA, 25 bp, Probe sequence
ctactcctctgacgaatgggtatat

SEQ ID NO: 281132 - DNA, 25 bp, Probe sequence
ctgtcatcagaatctgtcggccaaa

SEQ ID NO: 281133 - DNA, 25 bp, Probe sequence
ctgaagcagcccgcatattaggcgc

SEQ ID NO: 281134 - DNA, 25 bp, Probe sequence
cggatcacggcaatgcggctgcact

SEQ ID NO: 281135 - DNA, 25 bp, Probe sequence
ccttccggcgcataaagtcagcaag

SEQ ID NO: 281136 - DNA, 25 bp, Probe sequence
ccggatcacggcaatgcggctgcac

SEQ ID NO: 281137 - DNA, 25 bp, Probe sequence
ccgcatattaggcgcagataaaaga

SEQ ID NO: 281138 - DNA, 25 bp, Probe sequence
ccatccggatcacggcaatgcggct

SEQ ID NO: 281139 - DNA, 25 bp, Probe sequence
cctctgacgaatgggtatattgaaa

SEQ ID NO: 281140 - DNA, 25 bp, Probe sequence
gccttccggcgcataaagtcagcaa

SEQ ID NO: 281141 - DNA, 25 bp, Probe sequence
gcccgcatattaggcgcagataaaa

SEQ ID NO: 281142 - DNA, 25 bp, Probe sequence
gctgaagcagcccgcatattaggcg

SEQ ID NO: 281143 - DNA, 25 bp, Probe sequence
gctgcactggtggaagaagcgatct

SEQ ID NO: 281144 - DNA, 25 bp, Probe sequence
gcagctgaagcagcccgcatattag

SEQ ID NO: 281145 - DNA, 25 bp, Probe sequence
gcagcccgcatattaggcgcagata

SEQ ID NO: 281146 - DNA, 25 bp, Probe sequence
gcaatgcggctgcactggtggaaga

SEQ ID NO: 281147 - DNA, 25 bp, Probe sequence
gaattcagctaacgcttccagaccg

SEQ ID NO: 281148 - DNA, 25 bp, Probe sequence
gcaattcggtcaattgtcactgtca

SEQ ID NO: 281149 - DNA, 25 bp, Probe sequence
gaagcagctgaagcagcccgcatat

SEQ ID NO: 281150 - DNA, 25 bp, Probe sequence
gaaatcgttgaagcgagagaaaagc

SEQ ID NO: 281151 - DNA, 25 bp, Probe sequence
gacagaagcggaactctcttctaac

SEQ ID NO: 281152 - DNA, 25 bp, Probe sequence
gatcacggcaatgcggctgcactgg

SEQ ID NO: 281153 - DNA, 25 bp, Probe sequence
gagtgatcaggcaattcggtcaatt

SEQ ID NO: 281154 - DNA, 25 bp, Probe sequence
gatcaggcaattcggtcaattgtca

SEQ ID NO: 281155 - DNA, 25 bp, Probe sequence
gatcgccatccggatcacggcaatg

SEQ ID NO: 281156 - DNA, 25 bp, Probe sequence
gatatctcggatacaatagaggcaa

SEQ ID NO: 281157 - DNA, 25 bp, Probe sequence
gattccgtttctactcctctgacga

SEQ ID NO: 281158 - DNA, 25 bp, Probe sequence
gttattgatatctcggatacaatag

SEQ ID NO: 281159 - DNA, 25 bp, Probe sequence
gtcactgtcatcagaatctgtcggc

SEQ ID NO: 281160 - DNA, 25 bp, Probe sequence
gtcaattgtcactgtcatcagaatc

SEQ ID NO: 281161 - DNA, 25 bp, Probe sequence
gtcatcagaatctgtcggccaaaag

SEQ ID NO: 281162 - DNA, 25 bp, Probe sequence
ggatcgccatccggatcacggcaat

SEQ ID NO: 281163 - DNA, 25 bp, Probe sequence
ggtcaattgtcactgtcatcagaat

SEQ ID NO: 281164 - DNA, 25 bp, Probe sequence
ggctgcactggtggaagaagcgatc

SEQ ID NO: 281165 - DNA, 25 bp, Probe sequence
ggcaattcggtcaattgtcactgtc

SEQ ID NO: 281166 - DNA, 25 bp, Probe sequence
tgatcaggcaattcggtcaattgtc

SEQ ID NO: 281167 - DNA, 25 bp, Probe sequence
tgatatctcggatacaatagaggca

SEQ ID NO: 281168 - DNA, 25 bp, Probe sequence
tgcactggtggaagaagcgatcttt

SEQ ID NO: 281169 - DNA, 25 bp, Probe sequence
tgaaatcgttgaagcgagagaaaag

SEQ ID NO: 281170 - DNA, 25 bp, Probe sequence
tgagtgatcaggcaattcggtcaat

SEQ ID NO: 281171 - DNA, 25 bp, Probe sequence
tgaagcagcccgcatattaggcgca

SEQ ID NO: 281172 - DNA, 25 bp, Probe sequence
tccggatcacggcaatgcggctgca

SEQ ID NO: 281173 - DNA, 25 bp, Probe sequence
tcagctaacgcttccagaccgcggc

SEQ ID NO: 281174 - DNA, 25 bp, Probe sequence
tccagaccgcggcctaataatgagt

SEQ ID NO: 281175 - DNA, 25 bp, Probe sequence
ttcagctaacgcttccagaccgcgg

SEQ ID NO: 281176 - DNA, 25 bp, Probe sequence
tccggcgcataaagtcagcaaggtt

SEQ ID NO: 281177 - DNA, 25 bp, Probe sequence
tcctctgacgaatgggtatattgaa

SEQ ID NO: 281178 - DNA, 25 bp, Probe sequence
tcggtcaattgtcactgtcatcaga

SEQ ID NO: 281179 - DNA, 25 bp, Probe sequence
tcatcagccggattttgttattgat

SEQ ID NO: 281180 - DNA, 25 bp, Probe sequence
tcatcagaatctgtcggccaaaagc

SEQ ID NO: 281181 - DNA, 25 bp, Probe sequence
tcacggcaatgcggctgcactggtg

SEQ ID NO: 281182 - DNA, 25 bp, Probe sequence
tcagaatctgtcggccaaaagcggt

SEQ ID NO: 281183 - DNA, 25 bp, Probe sequence
tcaattgtcactgtcatcagaatct

SEQ ID NO: 281184 - DNA, 25 bp, Probe sequence
tactcctctgacgaatgggtatatt

SEQ ID NO: 281185 - DNA, 25 bp, Probe sequence
tattgaaatcgttgaagcgagagaa

SEQ ID NO: 281186 - DNA, 25 bp, Probe sequence
tttgacagaagcggaactctcttct

SEQ ID NO: 281187 - DNA, 25 bp, Probe sequence
tttgttattgatatctcggatacaa

SEQ ID NO: 281188 - DNA, 25 bp, Probe sequence
ttctactcctctgacgaatgggtat

SEQ ID NO: 281189 - DNA, 25 bp, Probe sequence
tttcatcagccggattttgttattg

SEQ ID NO: 281190 - DNA, 25 bp, Probe sequence
ttttgttattgatatctcggataca

SEQ ID NO: 281191 - DNA, 25 bp, Probe sequence
ttcatcagccggattttgttattga

SEQ ID NO: 281192 - DNA, 25 bp, Probe sequence
ttcggtcaattgtcactgtcatcag

SEQ ID NO: 281193 - DNA, 25 bp, Probe sequence
ttccagaccgcggcctaataatgag

SEQ ID NO: 281194 - DNA, 25 bp, Probe sequence
ttgtcactgtcatcagaatctgtcg

SEQ ID NO: 281195 - DNA, 25 bp, Probe sequence
ttgttattgatatctcggatacaat

SEQ ID NO: 281196 - DNA, 25 bp, Probe sequence
attgcattagagcacggagtccgtc

SEQ ID NO: 281197 - DNA, 25 bp, Probe sequence
cttgacgcaccaagcggaactgcgc

SEQ ID NO: 281198 - DNA, 25 bp, Probe sequence
attgagcttcatcatgaccagaagc

SEQ ID NO: 281199 - DNA, 25 bp, Probe sequence
attagtcattgcgggaccgcgtgga

SEQ ID NO: 281200 - DNA, 25 bp, Probe sequence
attatctgatgtgatgcctgttgag

SEQ ID NO: 281201 - DNA, 25 bp, Probe sequence
attattgagcttcatcatgaccaga

SEQ ID NO: 281202 - DNA, 25 bp, Probe sequence
atagaccatacatacgatcagcaaa

SEQ ID NO: 281203 - DNA, 25 bp, Probe sequence
atcggagccatcatcgcgccaaatt

SEQ ID NO: 281204 - DNA, 25 bp, Probe sequence
atcatgaccagaagcttgacgcacc

SEQ ID NO: 281205 - DNA, 25 bp, Probe sequence
atgctttcatttacacagatatcca

SEQ ID NO: 281206 - DNA, 25 bp, Probe sequence
agggatcggagccatcatcgcgcca

SEQ ID NO: 281207 - DNA, 25 bp, Probe sequence
atggctgccaactattttgaggatg

SEQ ID NO: 281208 - DNA, 25 bp, Probe sequence
agtcattgcgggaccgcgtggaaga

SEQ ID NO: 281209 - DNA, 25 bp, Probe sequence
agtcagatgctttcatttacacaga

SEQ ID NO: 281210 - DNA, 25 bp, Probe sequence
agcttgacgcaccaagcggaactgc

SEQ ID NO: 281211 - DNA, 25 bp, Probe sequence
agcagcaaggacatccggatgaaaa

SEQ ID NO: 281212 - DNA, 25 bp, Probe sequence
agcttcatcatgaccagaagcttga

SEQ ID NO: 281213 - DNA, 25 bp, Probe sequence
acgcaccaagcggaactgcgcttaa

SEQ ID NO: 281214 - DNA, 25 bp, Probe sequence
acagaaacacaaccggatgtcttga

SEQ ID NO: 281215 - DNA, 25 bp, Probe sequence
acacaaccggatgtcttgattgatt

SEQ ID NO: 281216 - DNA, 25 bp, Probe sequence
acaaccggatgtcttgattgattta

SEQ ID NO: 281217 - DNA, 25 bp, Probe sequence
aaattctcccaggagcaagaggagc

SEQ ID NO: 281218 - DNA, 25 bp, Probe sequence
aaattatctgatgtgatgcctgttg

SEQ ID NO: 281219 - DNA, 25 bp, Probe sequence
aaattttgcgctcggtgcgatactg

SEQ ID NO: 281220 - DNA, 25 bp, Probe sequence
aaagggatcggagccatcatcgcgc

SEQ ID NO: 281221 - DNA, 25 bp, Probe sequence
aaagcagcaaggacatccggatgaa

SEQ ID NO: 281222 - DNA, 25 bp, Probe sequence
aagcttgacgcaccaagcggaactg

SEQ ID NO: 281223 - DNA, 25 bp, Probe sequence
catgaccagaagcttgacgcaccaa

SEQ ID NO: 281224 - DNA, 25 bp, Probe sequence
aagagctcacatctttaacagaaga

SEQ ID NO: 281225 - DNA, 25 bp, Probe sequence
caaattttgcgctcggtgcgatact

SEQ ID NO: 281226 - DNA, 25 bp, Probe sequence
cacaaccggatgtcttgattgattt

SEQ ID NO: 281227 - DNA, 25 bp, Probe sequence
gcacggagtccgtccagttgtcgga

SEQ ID NO: 281228 - DNA, 25 bp, Probe sequence
cacagatatccatgcctgttttaca

SEQ ID NO: 281229 - DNA, 25 bp, Probe sequence
cttgtaggggccatagaccatacat

SEQ ID NO: 281230 - DNA, 25 bp, Probe sequence
cagcaaggacatccggatgaaaaag

SEQ ID NO: 281231 - DNA, 25 bp, Probe sequence
cagaaacacaaccggatgtcttgat

SEQ ID NO: 281232 - DNA, 25 bp, Probe sequence
cagaagcttgacgcaccaagcggaa

SEQ ID NO: 281233 - DNA, 25 bp, Probe sequence
cagatatccatgcctgttttacaga

SEQ ID NO: 281234 - DNA, 25 bp, Probe sequence
cagatgctttcatttacacagatat

SEQ ID NO: 281235 - DNA, 25 bp, Probe sequence
catcatcgcgccaaattttgcgctc

SEQ ID NO: 281236 - DNA, 25 bp, Probe sequence
ctttcatttacacagatatccatgc

SEQ ID NO: 281237 - DNA, 25 bp, Probe sequence
ctattttgaggatgttgagattatt

SEQ ID NO: 281238 - DNA, 25 bp, Probe sequence
ctcccaggagcaagaggagcggagc

SEQ ID NO: 281239 - DNA, 25 bp, Probe sequence
ctgatgtgatgcctgttgagtcaga

SEQ ID NO: 281240 - DNA, 25 bp, Probe sequence
ccaggagcaagaggagcggagcaaa

SEQ ID NO: 281241 - DNA, 25 bp, Probe sequence
cgccaaattttgcgctcggtgcgat

SEQ ID NO: 281242 - DNA, 25 bp, Probe sequence
cgcgccaaattttgcgctcggtgcg

SEQ ID NO: 281243 - DNA, 25 bp, Probe sequence
cgctcggtgcgatactgatgatgaa

SEQ ID NO: 281244 - DNA, 25 bp, Probe sequence
cctgttgagtcagatgctttcattt

SEQ ID NO: 281245 - DNA, 25 bp, Probe sequence
ccatagaccatacatacgatcagca

SEQ ID NO: 281246 - DNA, 25 bp, Probe sequence
ccatcatcgcgccaaattttgcgct

SEQ ID NO: 281247 - DNA, 25 bp, Probe sequence
ccaaattttgcgctcggtgcgatac

SEQ ID NO: 281248 - DNA, 25 bp, Probe sequence
ccaactattttgaggatgttgagat

SEQ ID NO: 281249 - DNA, 25 bp, Probe sequence
gccatcatcgcgccaaattttgcgc

SEQ ID NO: 281250 - DNA, 25 bp, Probe sequence
gccaactattttgaggatgttgaga

SEQ ID NO: 281251 - DNA, 25 bp, Probe sequence
gcggaactgcgcttaaaacagcgga

SEQ ID NO: 281252 - DNA, 25 bp, Probe sequence
gctgccaactattttgaggatgttg

SEQ ID NO: 281253 - DNA, 25 bp, Probe sequence
gcaccaagcggaactgcgcttaaaa

SEQ ID NO: 281254 - DNA, 25 bp, Probe sequence
gaagcttgacgcaccaagcggaact

SEQ ID NO: 281255 - DNA, 25 bp, Probe sequence
gaacaaccggtttctcagaagctga

SEQ ID NO: 281256 - DNA, 25 bp, Probe sequence
gaaattctcccaggagcaagaggag

SEQ ID NO: 281257 - DNA, 25 bp, Probe sequence
gacgcaccaagcggaactgcgctta

SEQ ID NO: 281258 - DNA, 25 bp, Probe sequence
gagccatcatcgcgccaaattttgc

SEQ ID NO: 281259 - DNA, 25 bp, Probe sequence
gaccagaagcttgacgcaccaagcg

SEQ ID NO: 281260 - DNA, 25 bp, Probe sequence
gagcttcatcatgaccagaagcttg

SEQ ID NO: 281261 - DNA, 25 bp, Probe sequence
gagctcacatctttaacagaagaaa

SEQ ID NO: 281262 - DNA, 25 bp, Probe sequence
gagtcagatgctttcatttacacag

SEQ ID NO: 281263 - DNA, 25 bp, Probe sequence
gatgcctgttgagtcagatgctttc

SEQ ID NO: 281264 - DNA, 25 bp, Probe sequence
gatatccatgcctgttttacagaaa

SEQ ID NO: 281265 - DNA, 25 bp, Probe sequence
gtcagatgctttcatttacacagat

SEQ ID NO: 281266 - DNA, 25 bp, Probe sequence
tgtgatgcctgttgagtcagatgct

SEQ ID NO: 281267 - DNA, 25 bp, Probe sequence
gtgatgcctgttgagtcagatgctt

SEQ ID NO: 281268 - DNA, 25 bp, Probe sequence
ggggccatagaccatacatacgatc

SEQ ID NO: 281269 - DNA, 25 bp, Probe sequence
ggatcggagccatcatcgcgccaaa

SEQ ID NO: 281270 - DNA, 25 bp, Probe sequence
ttctcccaggagcaagaggagcgga

SEQ ID NO: 281271 - DNA, 25 bp, Probe sequence
tggctgccaactattttgaggatgt

SEQ ID NO: 281272 - DNA, 25 bp, Probe sequence
ggccatagaccatacatacgatcag

SEQ ID NO: 281273 - DNA, 25 bp, Probe sequence
tgtaggggccatagaccatacatac

SEQ ID NO: 281274 - DNA, 25 bp, Probe sequence
tgaccagaagcttgacgcaccaagc

SEQ ID NO: 281275 - DNA, 25 bp, Probe sequence
tgatgtgatgcctgttgagtcagat

SEQ ID NO: 281276 - DNA, 25 bp, Probe sequence
tgcattagagcacggagtccgtcca

SEQ ID NO: 281277 - DNA, 25 bp, Probe sequence
tgcgctcggtgcgatactgatgatg

SEQ ID NO: 281278 - DNA, 25 bp, Probe sequence
tgctttcatttacacagatatccat

SEQ ID NO: 281279 - DNA, 25 bp, Probe sequence
tgcgcttaaaacagcggaaatgatt

SEQ ID NO: 281280 - DNA, 25 bp, Probe sequence
tgcctgttgagtcagatgctttcat

SEQ ID NO: 281281 - DNA, 25 bp, Probe sequence
tgccaactattttgaggatgttgag

SEQ ID NO: 281282 - DNA, 25 bp, Probe sequence
tccatgcctgttttacagaaacaca

SEQ ID NO: 281283 - DNA, 25 bp, Probe sequence
tcgcgccaaattttgcgctcggtgc

SEQ ID NO: 281284 - DNA, 25 bp, Probe sequence
tcggagccatcatcgcgccaaattt

SEQ ID NO: 281285 - DNA, 25 bp, Probe sequence
tctgatgtgatgcctgttgagtcag

SEQ ID NO: 281286 - DNA, 25 bp, Probe sequence
tcggtgcgatactgatgatgaaatt

SEQ ID NO: 281287 - DNA, 25 bp, Probe sequence
tcatcgcgccaaattttgcgctcgg

SEQ ID NO: 281288 - DNA, 25 bp, Probe sequence
tcatttacacagatatccatgcctg

SEQ ID NO: 281289 - DNA, 25 bp, Probe sequence
tcatcatgaccagaagcttgacgca

SEQ ID NO: 281290 - DNA, 25 bp, Probe sequence
tacatacaaaaattgcattagagca

SEQ ID NO: 281291 - DNA, 25 bp, Probe sequence
tagaccatacatacgatcagcaaaa

SEQ ID NO: 281292 - DNA, 25 bp, Probe sequence
taggggccatagaccatacatacga

SEQ ID NO: 281293 - DNA, 25 bp, Probe sequence
tatctgatgtgatgcctgttgagtc

SEQ ID NO: 281294 - DNA, 25 bp, Probe sequence
tttgcgctcggtgcgatactgatga

SEQ ID NO: 281295 - DNA, 25 bp, Probe sequence
ttctcagaagctgatttaaaagagc

SEQ ID NO: 281296 - DNA, 25 bp, Probe sequence
ttattgagcttcatcatgaccagaa

SEQ ID NO: 281297 - DNA, 25 bp, Probe sequence
ttagagcacggagtccgtccagttg

SEQ ID NO: 281298 - DNA, 25 bp, Probe sequence
ttgaccttgtaggggccatagacca

SEQ ID NO: 281299 - DNA, 25 bp, Probe sequence
ttcatcatgaccagaagcttgacgc

SEQ ID NO: 281300 - DNA, 25 bp, Probe sequence
ttcatttacacagatatccatgcct

SEQ ID NO: 281301 - DNA, 25 bp, Probe sequence
ttgcgctcggtgcgatactgatgat

SEQ ID NO: 281302 - DNA, 25 bp, Probe sequence
ttggcagaacgaacaccacattttg

SEQ ID NO: 281303 - DNA, 25 bp, Probe sequence
ttgcattagagcacggagtccgtcc

SEQ ID NO: 281304 - DNA, 25 bp, Probe sequence
ttgagtcagatgctttcatttacac

SEQ ID NO: 281305 - DNA, 25 bp, Probe sequence
attgatcagcttgtgtatggtttag

SEQ ID NO: 281306 - DNA, 25 bp, Probe sequence
attccgctcgccacaaatatgggta

SEQ ID NO: 281307 - DNA, 25 bp, Probe sequence
atatggttcaatttacgactgccta

SEQ ID NO: 281308 - DNA, 25 bp, Probe sequence
ataaccgtgcttctttcatgtcagg

SEQ ID NO: 281309 - DNA, 25 bp, Probe sequence
ataatgctgacgttcttgcttttgg

SEQ ID NO: 281310 - DNA, 25 bp, Probe sequence
atgctgacgttcttgcttttggcgc

SEQ ID NO: 281311 - DNA, 25 bp, Probe sequence
atgtctcggcattaatccgtttatg

SEQ ID NO: 281312 - DNA, 25 bp, Probe sequence
agtgatgatgtcgagatcggaatgg

SEQ ID NO: 281313 - DNA, 25 bp, Probe sequence
agattgatcagcttgtgtatggttt

SEQ ID NO: 281314 - DNA, 25 bp, Probe sequence
agaatcatgatctatacgcaaccgg

SEQ ID NO: 281315 - DNA, 25 bp, Probe sequence
agcaaatcggtgcactgatcgctgc

SEQ ID NO: 281316 - DNA, 25 bp, Probe sequence
agccgcatgaaccggatgtctcggc

SEQ ID NO: 281317 - DNA, 25 bp, Probe sequence
accgcgcagccgcatgaaccggatg

SEQ ID NO: 281318 - DNA, 25 bp, Probe sequence
acgccatgattcttataaccgtgct

SEQ ID NO: 281319 - DNA, 25 bp, Probe sequence
aaattcttgtgcgcacacttgatga

SEQ ID NO: 281320 - DNA, 25 bp, Probe sequence
aaattgctttgatcgcgcatgacaa

SEQ ID NO: 281321 - DNA, 25 bp, Probe sequence
aactgtcagtcgaacaagtcatgaa

SEQ ID NO: 281322 - DNA, 25 bp, Probe sequence
aaccgtgcttctttcatgtcaggcg

SEQ ID NO: 281323 - DNA, 25 bp, Probe sequence
aagattgatcagcttgtgtatggtt

SEQ ID NO: 281324 - DNA, 25 bp, Probe sequence
aatgcactcgatcttgtcatttttt

SEQ ID NO: 281325 - DNA, 25 bp, Probe sequence
aatcatgatctatacgcaaccggaa

SEQ ID NO: 281326 - DNA, 25 bp, Probe sequence
aattcatgaggcgacaggtcttcaa

SEQ ID NO: 281327 - DNA, 25 bp, Probe sequence
caatgcactcgatcttgtcattttt

SEQ ID NO: 281328 - DNA, 25 bp, Probe sequence
caaatcggtgcactgatcgctgcca

SEQ ID NO: 281329 - DNA, 25 bp, Probe sequence
catgaggcgacaggtcttcaaattg

SEQ ID NO: 281330 - DNA, 25 bp, Probe sequence
cactgatcgctgccaatgcactcga

SEQ ID NO: 281331 - DNA, 25 bp, Probe sequence
catgtcaggcgttaaactgtcagtc

SEQ ID NO: 281332 - DNA, 25 bp, Probe sequence
catgattcttataaccgtgcttctt

SEQ ID NO: 281333 - DNA, 25 bp, Probe sequence
catgaaccggatgtctcggcattaa

SEQ ID NO: 281334 - DNA, 25 bp, Probe sequence
cattaatccgtttatgtgatgtgta

SEQ ID NO: 281335 - DNA, 25 bp, Probe sequence
cttttggcgcccacagtgatgatgt

SEQ ID NO: 281336 - DNA, 25 bp, Probe sequence
ctttcatgtcaggcgttaaactgtc

SEQ ID NO: 281337 - DNA, 25 bp, Probe sequence
ctcgccacaaatatgggtactgcgg

SEQ ID NO: 281338 - DNA, 25 bp, Probe sequence
ctgatcgctgccaatgcactcgatc

SEQ ID NO: 281339 - DNA, 25 bp, Probe sequence
ctgcggaaattcttgtgcgcacact

SEQ ID NO: 281340 - DNA, 25 bp, Probe sequence
cggtgcactgatcgctgccaatgca

SEQ ID NO: 281341 - DNA, 25 bp, Probe sequence
cggcattaatccgtttatgtgatgt

SEQ ID NO: 281342 - DNA, 25 bp, Probe sequence
tctcggcattaatccgtttatgtga

SEQ ID NO: 281343 - DNA, 25 bp, Probe sequence
cgctgccaatgcactcgatcttgtc

SEQ ID NO: 281344 - DNA, 25 bp, Probe sequence
cgcccacagtgatgatgtcgagatc

SEQ ID NO: 281345 - DNA, 25 bp, Probe sequence
ccgcgcagccgcatgaaccggatgt

SEQ ID NO: 281346 - DNA, 25 bp, Probe sequence
ccgctcgccacaaatatgggtactg

SEQ ID NO: 281347 - DNA, 25 bp, Probe sequence
gccgcatgaaccggatgtctcggca

SEQ ID NO: 281348 - DNA, 25 bp, Probe sequence
ccagcaaatcggtgcactgatcgct

SEQ ID NO: 281349 - DNA, 25 bp, Probe sequence
gcgcagccgcatgaaccggatgtct

SEQ ID NO: 281350 - DNA, 25 bp, Probe sequence
gcgcacacttgatgaaggtgttttc

SEQ ID NO: 281351 - DNA, 25 bp, Probe sequence
gctgaccgcgcagccgcatgaaccg

SEQ ID NO: 281352 - DNA, 25 bp, Probe sequence
gctgccaatgcactcgatcttgtca

SEQ ID NO: 281353 - DNA, 25 bp, Probe sequence
gctgacgttcttgcttttggcgccc

SEQ ID NO: 281354 - DNA, 25 bp, Probe sequence
gcttttggcgcccacagtgatgatg

SEQ ID NO: 281355 - DNA, 25 bp, Probe sequence
gctttgatcgcgcatgacaagaaaa

SEQ ID NO: 281356 - DNA, 25 bp, Probe sequence
gcagccgcatgaaccggatgtctcg

SEQ ID NO: 281357 - DNA, 25 bp, Probe sequence
gcaaatcggtgcactgatcgctgcc

SEQ ID NO: 281358 - DNA, 25 bp, Probe sequence
gaaccggatgtctcggcattaatcc

SEQ ID NO: 281359 - DNA, 25 bp, Probe sequence
gaatcatgatctatacgcaaccgga

SEQ ID NO: 281360 - DNA, 25 bp, Probe sequence
gaccagcaaatcggtgcactgatcg

SEQ ID NO: 281361 - DNA, 25 bp, Probe sequence
gatgtctcggcattaatccgtttat

SEQ ID NO: 281362 - DNA, 25 bp, Probe sequence
gatcgctgccaatgcactcgatctt

SEQ ID NO: 281363 - DNA, 25 bp, Probe sequence
gatcagcttgtgtatggtttagaaa

SEQ ID NO: 281364 - DNA, 25 bp, Probe sequence
gttcttgcttttggcgcccacagtg

SEQ ID NO: 281365 - DNA, 25 bp, Probe sequence
gttaaactgtcagtcgaacaagtca

SEQ ID NO: 281366 - DNA, 25 bp, Probe sequence
gtcagtcgaacaagtcatgaagatt

SEQ ID NO: 281367 - DNA, 25 bp, Probe sequence
gtgcttctttcatgtcaggcgttaa

SEQ ID NO: 281368 - DNA, 25 bp, Probe sequence
gggagaccagcaaatcggtgcactg

SEQ ID NO: 281369 - DNA, 25 bp, Probe sequence
ggtgcactgatcgctgccaatgcac

SEQ ID NO: 281370 - DNA, 25 bp, Probe sequence
ggtactgcggaaattcttgtgcgca

SEQ ID NO: 281371 - DNA, 25 bp, Probe sequence
ggagaccagcaaatcggtgcactga

SEQ ID NO: 281372 - DNA, 25 bp, Probe sequence
ggaaattcttgtgcgcacacttgat

SEQ ID NO: 281373 - DNA, 25 bp, Probe sequence
tggttcaatttacgactgcctatcg

SEQ ID NO: 281374 - DNA, 25 bp, Probe sequence
ggcgcccacagtgatgatgtcgaga

SEQ ID NO: 281375 - DNA, 25 bp, Probe sequence
tcgccacaaatatgggtactgcgga

SEQ ID NO: 281376 - DNA, 25 bp, Probe sequence
tgatctatacgcaaccggaaccaca

SEQ ID NO: 281377 - DNA, 25 bp, Probe sequence
tgtgtattccattccgctcgccaca

SEQ ID NO: 281378 - DNA, 25 bp, Probe sequence
tgtataatgctgacgttcttgcttt

SEQ ID NO: 281379 - DNA, 25 bp, Probe sequence
tgatgtgtattccattccgctcgcc

SEQ ID NO: 281380 - DNA, 25 bp, Probe sequence
taaccgtgcttctttcatgtcaggc

SEQ ID NO: 281381 - DNA, 25 bp, Probe sequence
tgacgttcttgcttttggcgcccac

SEQ ID NO: 281382 - DNA, 25 bp, Probe sequence
tgaaaattgctttgatcgcgcatga

SEQ ID NO: 281383 - DNA, 25 bp, Probe sequence
tgcactgatcgctgccaatgcactc

SEQ ID NO: 281384 - DNA, 25 bp, Probe sequence
tgcttctttcatgtcaggcgttaaa

SEQ ID NO: 281385 - DNA, 25 bp, Probe sequence
tgccaatgcactcgatcttgtcatt

SEQ ID NO: 281386 - DNA, 25 bp, Probe sequence
tgcgcacacttgatgaaggtgtttt

SEQ ID NO: 281387 - DNA, 25 bp, Probe sequence
tcttcggggagaagagccgaatgta

SEQ ID NO: 281388 - DNA, 25 bp, Probe sequence
tcggtgcactgatcgctgccaatgc

SEQ ID NO: 281389 - DNA, 25 bp, Probe sequence
tcggcattaatccgtttatgtgatg

SEQ ID NO: 281390 - DNA, 25 bp, Probe sequence
tcaggcgttaaactgtcagtcgaac

SEQ ID NO: 281391 - DNA, 25 bp, Probe sequence
tcttataaccgtgcttctttcatgt

SEQ ID NO: 281392 - DNA, 25 bp, Probe sequence
tcttgtgcgcacacttgatgaaggt

SEQ ID NO: 281393 - DNA, 25 bp, Probe sequence
tcatgatctatacgcaaccggaacc

SEQ ID NO: 281394 - DNA, 25 bp, Probe sequence
tcttgcttttggcgcccacagtgat

SEQ ID NO: 281395 - DNA, 25 bp, Probe sequence
tcatgaggcgacaggtcttcaaatt

SEQ ID NO: 281396 - DNA, 25 bp, Probe sequence
tcatgtcaggcgttaaactgtcagt

SEQ ID NO: 281397 - DNA, 25 bp, Probe sequence
tcaatttacgactgcctatcgggat

SEQ ID NO: 281398 - DNA, 25 bp, Probe sequence
taatccgtttatgtgatgtgtattc

SEQ ID NO: 281399 - DNA, 25 bp, Probe sequence
tactgcggaaattcttgtgcgcaca

SEQ ID NO: 281400 - DNA, 25 bp, Probe sequence
tacgactgcctatcgggatatttta

SEQ ID NO: 281401 - DNA, 25 bp, Probe sequence
tatggttcaatttacgactgcctat

SEQ ID NO: 281402 - DNA, 25 bp, Probe sequence
tatgggtactgcggaaattcttgtg

SEQ ID NO: 281403 - DNA, 25 bp, Probe sequence
ttccgctcgccacaaatatgggtac

SEQ ID NO: 281404 - DNA, 25 bp, Probe sequence
tttatgtgatgtgtattccattccg

SEQ ID NO: 281405 - DNA, 25 bp, Probe sequence
ttttggcgcccacagtgatgatgtc

SEQ ID NO: 281406 - DNA, 25 bp, Probe sequence
ttaaactgtcagtcgaacaagtcat

SEQ ID NO: 281407 - DNA, 25 bp, Probe sequence
ttcatgaggcgacaggtcttcaaat

SEQ ID NO: 281408 - DNA, 25 bp, Probe sequence
ttcttgtgcgcacacttgatgaagg

SEQ ID NO: 281409 - DNA, 25 bp, Probe sequence
ttcatgtcaggcgttaaactgtcag

SEQ ID NO: 281410 - DNA, 25 bp, Probe sequence
ttctttcatgtcaggcgttaaactg

SEQ ID NO: 281411 - DNA, 25 bp, Probe sequence
ttgtgcgcacacttgatgaaggtgt

SEQ ID NO: 281412 - DNA, 25 bp, Probe sequence
ttggcgcccacagtgatgatgtcga

SEQ ID NO: 281413 - DNA, 25 bp, Probe sequence
attcgttatacggaagatgatgaac

SEQ ID NO: 281414 - DNA, 25 bp, Probe sequence
atttgtatccaaggtgctgaatctt

SEQ ID NO: 281415 - DNA, 25 bp, Probe sequence
atgaaccgcttcatgccactgaata

SEQ ID NO: 281416 - DNA, 25 bp, Probe sequence
agacgcaggcacaactctttatacg

SEQ ID NO: 281417 - DNA, 25 bp, Probe sequence
agctgtacaatcgtttcatcattcg

SEQ ID NO: 281418 - DNA, 25 bp, Probe sequence
acaatcgtttcatcattcggcgtgc

SEQ ID NO: 281419 - DNA, 25 bp, Probe sequence
aaccgcttcatgccactgaatacgt

SEQ ID NO: 281420 - DNA, 25 bp, Probe sequence
aagctgtacaatcgtttcatcattc

SEQ ID NO: 281421 - DNA, 25 bp, Probe sequence
aatcgtttcatcattcggcgtgcga

SEQ ID NO: 281422 - DNA, 25 bp, Probe sequence
caatcgtttcatcattcggcgtgcg

SEQ ID NO: 281423 - DNA, 25 bp, Probe sequence
caactctttatacggttggctctca

SEQ ID NO: 281424 - DNA, 25 bp, Probe sequence
catgccactgaatacgttgaaaaaa

SEQ ID NO: 281425 - DNA, 25 bp, Probe sequence
catattcatttgtatccaaggtgct

SEQ ID NO: 281426 - DNA, 25 bp, Probe sequence
cttcatgccactgaatacgttgaaa

SEQ ID NO: 281427 - DNA, 25 bp, Probe sequence
ctcgtgggagacgcaggcacaactc

SEQ ID NO: 281428 - DNA, 25 bp, Probe sequence
ctctcgtgggagacgcaggcacaac

SEQ ID NO: 281429 - DNA, 25 bp, Probe sequence
cggcattcgttatacggaagatgat

SEQ ID NO: 281430 - DNA, 25 bp, Probe sequence
cgtttcatcattcggcgtgcgaatt

SEQ ID NO: 281431 - DNA, 25 bp, Probe sequence
cgttctctcgtgggagacgcaggca

SEQ ID NO: 281432 - DNA, 25 bp, Probe sequence
ccgcttcatgccactgaatacgttg

SEQ ID NO: 281433 - DNA, 25 bp, Probe sequence
gccgttctctcgtgggagacgcagg

SEQ ID NO: 281434 - DNA, 25 bp, Probe sequence
gcttcatgccactgaatacgttgaa

SEQ ID NO: 281435 - DNA, 25 bp, Probe sequence
gcattcgttatacggaagatgatga

SEQ ID NO: 281436 - DNA, 25 bp, Probe sequence
gcaggcacaactctttatacggttg

SEQ ID NO: 281437 - DNA, 25 bp, Probe sequence
gcacaactctttatacggttggctc

SEQ ID NO: 281438 - DNA, 25 bp, Probe sequence
gagacgcaggcacaactctttatac

SEQ ID NO: 281439 - DNA, 25 bp, Probe sequence
gatgatgaaccgcttcatgccactg

SEQ ID NO: 281440 - DNA, 25 bp, Probe sequence
gattcatattcatttgtatccaagg

SEQ ID NO: 281441 - DNA, 25 bp, Probe sequence
gttctctcgtgggagacgcaggcac

SEQ ID NO: 281442 - DNA, 25 bp, Probe sequence
gtatccaaggtgctgaatcttggag

SEQ ID NO: 281443 - DNA, 25 bp, Probe sequence
gtacaatcgtttcatcattcggcgt

SEQ ID NO: 281444 - DNA, 25 bp, Probe sequence
ggccgttctctcgtgggagacgcag

SEQ ID NO: 281445 - DNA, 25 bp, Probe sequence
ggagacgcaggcacaactctttata

SEQ ID NO: 281446 - DNA, 25 bp, Probe sequence
tgtacaatcgtttcatcattcggcg

SEQ ID NO: 281447 - DNA, 25 bp, Probe sequence
tgatgaaccgcttcatgccactgaa

SEQ ID NO: 281448 - DNA, 25 bp, Probe sequence
tgacattccggaaatttggatcgaa

SEQ ID NO: 281449 - DNA, 25 bp, Probe sequence
tgaaccgcttcatgccactgaatac

SEQ ID NO: 281450 - DNA, 25 bp, Probe sequence
tccaaggtgctgaatcttggaggag

SEQ ID NO: 281451 - DNA, 25 bp, Probe sequence
tcgtttcatcattcggcgtgcgaat

SEQ ID NO: 281452 - DNA, 25 bp, Probe sequence
tcatttgtatccaaggtgctgaatc

SEQ ID NO: 281453 - DNA, 25 bp, Probe sequence
taagctgtacaatcgtttcatcatt

SEQ ID NO: 281454 - DNA, 25 bp, Probe sequence
tattcatttgtatccaaggtgctga

SEQ ID NO: 281455 - DNA, 25 bp, Probe sequence
tttcatcattcggcgtgcgaattaa

SEQ ID NO: 281456 - DNA, 25 bp, Probe sequence
ttcggcattcgttatacggaagatg

SEQ ID NO: 281457 - DNA, 25 bp, Probe sequence
ttcatattcatttgtatccaaggtg

SEQ ID NO: 281458 - DNA, 25 bp, Probe sequence
ttctctcgtgggagacgcaggcaca

SEQ ID NO: 281459 - DNA, 25 bp, Probe sequence
ttgtatccaaggtgctgaatcttgg

SEQ ID NO: 281460 - DNA, 25 bp, Probe sequence
ttcatgccactgaatacgttgaaaa

SEQ ID NO: 281461 - DNA, 25 bp, Probe sequence
ttgacattccggaaatttggatcga

SEQ ID NO: 281462 - DNA, 25 bp, Probe sequence
attctcatcagtcgcaatgattcag

SEQ ID NO: 281463 - DNA, 25 bp, Probe sequence
atatgcgagcaaagcattctcatca

SEQ ID NO: 281464 - DNA, 25 bp, Probe sequence
atgacattgttcttacacggcacaa

SEQ ID NO: 281465 - DNA, 25 bp, Probe sequence
aggtgtggatgctctctatttagcg

SEQ ID NO: 281466 - DNA, 25 bp, Probe sequence
agggctgaaagcacaggtggcatat

SEQ ID NO: 281467 - DNA, 25 bp, Probe sequence
agtcgcaatgattcagctcgctgag

SEQ ID NO: 281468 - DNA, 25 bp, Probe sequence
agcacaggtggcatatgcgagcaaa

SEQ ID NO: 281469 - DNA, 25 bp, Probe sequence
agcaaagcattctcatcagtcgcaa

SEQ ID NO: 281470 - DNA, 25 bp, Probe sequence
agcattctcatcagtcgcaatgatt

SEQ ID NO: 281471 - DNA, 25 bp, Probe sequence
acctctttacgtatatgatgtggct

SEQ ID NO: 281472 - DNA, 25 bp, Probe sequence
acggctgttgcagcaggctttccgg

SEQ ID NO: 281473 - DNA, 25 bp, Probe sequence
acaggtggcatatgcgagcaaagca

SEQ ID NO: 281474 - DNA, 25 bp, Probe sequence
aagcaggcgtttatttctgcagggc

SEQ ID NO: 281475 - DNA, 25 bp, Probe sequence
aagcagacaaaatcaacatggtcat

SEQ ID NO: 281476 - DNA, 25 bp, Probe sequence
caaagcattctcatcagtcgcaatg

SEQ ID NO: 281477 - DNA, 25 bp, Probe sequence
ctatatacggctgttgcagcaggct

SEQ ID NO: 281478 - DNA, 25 bp, Probe sequence
ctttaagcaggcgtttatttctgca

SEQ ID NO: 281479 - DNA, 25 bp, Probe sequence
ctctatttagcggagaaatatggta

SEQ ID NO: 281480 - DNA, 25 bp, Probe sequence
ctgaaagcacaggtggcatatgcga

SEQ ID NO: 281481 - DNA, 25 bp, Probe sequence
cgcaatgattcagctcgctgaggaa

SEQ ID NO: 281482 - DNA, 25 bp, Probe sequence
gctgttgcagcaggctttccggcag

SEQ ID NO: 281483 - DNA, 25 bp, Probe sequence
gcaggctttccggcagaacgcatcc

SEQ ID NO: 281484 - DNA, 25 bp, Probe sequence
gcaggcgtttatttctgcagggctg

SEQ ID NO: 281485 - DNA, 25 bp, Probe sequence
gaaagcacaggtggcatatgcgagc

SEQ ID NO: 281486 - DNA, 25 bp, Probe sequence
gagctatatacggctgttgcagcag

SEQ ID NO: 281487 - DNA, 25 bp, Probe sequence
gattcagctcgctgaggaagaggga

SEQ ID NO: 281488 - DNA, 25 bp, Probe sequence
gttgcagcaggctttccggcagaac

SEQ ID NO: 281489 - DNA, 25 bp, Probe sequence
gtttatttctgcagggctgaaagca

SEQ ID NO: 281490 - DNA, 25 bp, Probe sequence
ggcgtttatttctgcagggctgaaa

SEQ ID NO: 281491 - DNA, 25 bp, Probe sequence
ggctttccggcagaacgcatccact

SEQ ID NO: 281492 - DNA, 25 bp, Probe sequence
ggcacaagcagacaaaatcaacatg

SEQ ID NO: 281493 - DNA, 25 bp, Probe sequence
ggctttaatacgtgagcgtgctaaa

SEQ ID NO: 281494 - DNA, 25 bp, Probe sequence
tggtacacctctttacgtatatgat

SEQ ID NO: 281495 - DNA, 25 bp, Probe sequence
tgtggatgctctctatttagcggag

SEQ ID NO: 281496 - DNA, 25 bp, Probe sequence
tgtcgtatccggagagagctatata

SEQ ID NO: 281497 - DNA, 25 bp, Probe sequence
tgcgagcaaagcattctcatcagtc

SEQ ID NO: 281498 - DNA, 25 bp, Probe sequence
tgctctctatttagcggagaaatat

SEQ ID NO: 281499 - DNA, 25 bp, Probe sequence
tcgcaatgattcagctcgctgagga

SEQ ID NO: 281500 - DNA, 25 bp, Probe sequence
tcatttagaaatcggaggtgtggat

SEQ ID NO: 281501 - DNA, 25 bp, Probe sequence
tacacctctttacgtatatgatgtg

SEQ ID NO: 281502 - DNA, 25 bp, Probe sequence
tttaatacgtgagcgtgctaaaagc

SEQ ID NO: 281503 - DNA, 25 bp, Probe sequence
tatacggctgttgcagcaggctttc

SEQ ID NO: 281504 - DNA, 25 bp, Probe sequence
tatatgatgtggctttaatacgtga

SEQ ID NO: 281505 - DNA, 25 bp, Probe sequence
tttccggcagaacgcatccactttc

SEQ ID NO: 281506 - DNA, 25 bp, Probe sequence
tttagatgtcgtatccggagagagc

SEQ ID NO: 281507 - DNA, 25 bp, Probe sequence
ttagatgtcgtatccggagagagct

SEQ ID NO: 281508 - DNA, 25 bp, Probe sequence
ttagaaatcggaggtgtggatgctc

SEQ ID NO: 281509 - DNA, 25 bp, Probe sequence
ttctttagatgtcgtatccggagag

SEQ ID NO: 281510 - DNA, 25 bp, Probe sequence
ttccggcagaacgcatccactttca

SEQ ID NO: 281511 - DNA, 25 bp, Probe sequence
ttctgcagggctgaaagcacaggtg

SEQ ID NO: 281512 - DNA, 25 bp, Probe sequence
attcagctgctgggtgtccattgcc

SEQ ID NO: 281513 - DNA, 25 bp, Probe sequence
atttctatgaaatcgtcgcttcttg

SEQ ID NO: 281514 - DNA, 25 bp, Probe sequence
ataatttctatgaaatcgtcgcttc

SEQ ID NO: 281515 - DNA, 25 bp, Probe sequence
atcacgcccggagtagaagcgcata

SEQ ID NO: 281516 - DNA, 25 bp, Probe sequence
atcggctcgcaaatctttgatacgg

SEQ ID NO: 281517 - DNA, 25 bp, Probe sequence
atcggaacacattcagctgctgggt

SEQ ID NO: 281518 - DNA, 25 bp, Probe sequence
atgaaatcgtcgcttcttgaagacc

SEQ ID NO: 281519 - DNA, 25 bp, Probe sequence
aactgcggatggcgcttgagcaccg

SEQ ID NO: 281520 - DNA, 25 bp, Probe sequence
agctgctgggtgtccattgccatat

SEQ ID NO: 281521 - DNA, 25 bp, Probe sequence
acgcatgactacattacaacgggcc

SEQ ID NO: 281522 - DNA, 25 bp, Probe sequence
accgcatcggctgcattgtggtgga

SEQ ID NO: 281523 - DNA, 25 bp, Probe sequence
tggcgcttgagcaccgcatcggctg

SEQ ID NO: 281524 - DNA, 25 bp, Probe sequence
caatcggaacacattcagctgctgg

SEQ ID NO: 281525 - DNA, 25 bp, Probe sequence
cactccatcgatgttcttcttcgga

SEQ ID NO: 281526 - DNA, 25 bp, Probe sequence
cagctgctgggtgtccattgccata

SEQ ID NO: 281527 - DNA, 25 bp, Probe sequence
catgactacattacaacgggccagg

SEQ ID NO: 281528 - DNA, 25 bp, Probe sequence
catcggctgcattgtggtggataat

SEQ ID NO: 281529 - DNA, 25 bp, Probe sequence
catacgcatgactacattacaacgg

SEQ ID NO: 281530 - DNA, 25 bp, Probe sequence
catatcggctcgcaaatctttgata

SEQ ID NO: 281531 - DNA, 25 bp, Probe sequence
cattgccatatcggctcgcaaatct

SEQ ID NO: 281532 - DNA, 25 bp, Probe sequence
ctgctgggtgtccattgccatatcg

SEQ ID NO: 281533 - DNA, 25 bp, Probe sequence
cggatcacgcccggagtagaagcgc

SEQ ID NO: 281534 - DNA, 25 bp, Probe sequence
cgggtcactccatcgatgttcttct

SEQ ID NO: 281535 - DNA, 25 bp, Probe sequence
cgatgttcttcttcggatcacgccc

SEQ ID NO: 281536 - DNA, 25 bp, Probe sequence
gctcgcaaatctttgatacggccgg

SEQ ID NO: 281537 - DNA, 25 bp, Probe sequence
cgcttgagcaccgcatcggctgcat

SEQ ID NO: 281538 - DNA, 25 bp, Probe sequence
ccattgccatatcggctcgcaaatc

SEQ ID NO: 281539 - DNA, 25 bp, Probe sequence
gcttgagcaccgcatcggctgcatt

SEQ ID NO: 281540 - DNA, 25 bp, Probe sequence
gcatacgcatgactacattacaacg

SEQ ID NO: 281541 - DNA, 25 bp, Probe sequence
gcatcggctgcattgtggtggataa

SEQ ID NO: 281542 - DNA, 25 bp, Probe sequence
gaagaactgcggatggcgcttgagc

SEQ ID NO: 281543 - DNA, 25 bp, Probe sequence
gaagcgcatacgcatgactacatta

SEQ ID NO: 281544 - DNA, 25 bp, Probe sequence
gaacacattcagctgctgggtgtcc

SEQ ID NO: 281545 - DNA, 25 bp, Probe sequence
gaaacgggtcactccatcgatgttc

SEQ ID NO: 281546 - DNA, 25 bp, Probe sequence
gatcttcataacggacaaactgaac

SEQ ID NO: 281547 - DNA, 25 bp, Probe sequence
gtattacaatcggaacacattcagc

SEQ ID NO: 281548 - DNA, 25 bp, Probe sequence
gtagaagcgcatacgcatgactaca

SEQ ID NO: 281549 - DNA, 25 bp, Probe sequence
gtccattgccatatcggctcgcaaa

SEQ ID NO: 281550 - DNA, 25 bp, Probe sequence
ggtgtccattgccatatcggctcgc

SEQ ID NO: 281551 - DNA, 25 bp, Probe sequence
ggtcactccatcgatgttcttcttc

SEQ ID NO: 281552 - DNA, 25 bp, Probe sequence
ggctcgcaaatctttgatacggccg

SEQ ID NO: 281553 - DNA, 25 bp, Probe sequence
tcacgcccggagtagaagcgcatac

SEQ ID NO: 281554 - DNA, 25 bp, Probe sequence
tccatcgatgttcttcttcggatca

SEQ ID NO: 281555 - DNA, 25 bp, Probe sequence
tcgcttcttgaagacctatgtaaag

SEQ ID NO: 281556 - DNA, 25 bp, Probe sequence
tcgtcgcttcttgaagacctatgta

SEQ ID NO: 281557 - DNA, 25 bp, Probe sequence
tcggaacacattcagctgctgggtg

SEQ ID NO: 281558 - DNA, 25 bp, Probe sequence
tcgatcttcataacggacaaactga

SEQ ID NO: 281559 - DNA, 25 bp, Probe sequence
tctatgaaatcgtcgcttcttgaag

SEQ ID NO: 281560 - DNA, 25 bp, Probe sequence
tcaaagtttggtttcgatcttcata

SEQ ID NO: 281561 - DNA, 25 bp, Probe sequence
ttcgatcttcataacggacaaactg

SEQ ID NO: 281562 - DNA, 25 bp, Probe sequence
attccaggggccatgcaggagcttg

SEQ ID NO: 281563 - DNA, 25 bp, Probe sequence
atcctgtctcccgatgaaaacatat

SEQ ID NO: 281564 - DNA, 25 bp, Probe sequence
atgctgccgcaggatgatcagtccg

SEQ ID NO: 281565 - DNA, 25 bp, Probe sequence
atgcaggagcttgaagcactcggct

SEQ ID NO: 281566 - DNA, 25 bp, Probe sequence
atggcagcttctacatacgaattaa

SEQ ID NO: 281567 - DNA, 25 bp, Probe sequence
agtgaccatcccgagctgaatatcg

SEQ ID NO: 281568 - DNA, 25 bp, Probe sequence
agtttgtcagtgaccatcccgagct

SEQ ID NO: 281569 - DNA, 25 bp, Probe sequence
accttaatggtcatgctgccgcagg

SEQ ID NO: 281570 - DNA, 25 bp, Probe sequence
acgaccttaatggtcatgctgccgc

SEQ ID NO: 281571 - DNA, 25 bp, Probe sequence
aaagtgaggcttctgggtgcatacc

SEQ ID NO: 281572 - DNA, 25 bp, Probe sequence
gaagcactcggctgcaaagtgaggc

SEQ ID NO: 281573 - DNA, 25 bp, Probe sequence
aatggtcatgctgccgcaggatgat

SEQ ID NO: 281574 - DNA, 25 bp, Probe sequence
aatgatatggcagcttctacatacg

SEQ ID NO: 281575 - DNA, 25 bp, Probe sequence
aatatcggggtcattgccaatgata

SEQ ID NO: 281576 - DNA, 25 bp, Probe sequence
aattcaaaattgagctctaggccca

SEQ ID NO: 281577 - DNA, 25 bp, Probe sequence
cagtccggggcgctgcatagagtgc

SEQ ID NO: 281578 - DNA, 25 bp, Probe sequence
caggatgatcagtccggggcgctgc

SEQ ID NO: 281579 - DNA, 25 bp, Probe sequence
caggagcttgaagcactcggctgca

SEQ ID NO: 281580 - DNA, 25 bp, Probe sequence
catcccgagctgaatatcggggtca

SEQ ID NO: 281581 - DNA, 25 bp, Probe sequence
cttctgggtgcataccagtcttacc

SEQ ID NO: 281582 - DNA, 25 bp, Probe sequence
ctgaatatcggggtcattgccaatg

SEQ ID NO: 281583 - DNA, 25 bp, Probe sequence
ctgcatagagtgctgtctgcatttt

SEQ ID NO: 281584 - DNA, 25 bp, Probe sequence
ctgggtgcataccagtcttaccaat

SEQ ID NO: 281585 - DNA, 25 bp, Probe sequence
ctgtctcccgatgaaaacatatctt

SEQ ID NO: 281586 - DNA, 25 bp, Probe sequence
ctgtctgcattttcttggagaaatt

SEQ ID NO: 281587 - DNA, 25 bp, Probe sequence
cggctgcaaagtgaggcttctgggt

SEQ ID NO: 281588 - DNA, 25 bp, Probe sequence
ccgcaggatgatcagtccggggcgc

SEQ ID NO: 281589 - DNA, 25 bp, Probe sequence
gctgtctgcattttcttggagaaat

SEQ ID NO: 281590 - DNA, 25 bp, Probe sequence
gcactcggctgcaaagtgaggcttc

SEQ ID NO: 281591 - DNA, 25 bp, Probe sequence
gaccatcccgagctgaatatcgggg

SEQ ID NO: 281592 - DNA, 25 bp, Probe sequence
gatgtattgattccaggggccatgc

SEQ ID NO: 281593 - DNA, 25 bp, Probe sequence
gatgatcagtccggggcgctgcata

SEQ ID NO: 281594 - DNA, 25 bp, Probe sequence
gatatggcagcttctacatacgaat

SEQ ID NO: 281595 - DNA, 25 bp, Probe sequence
gtattgattccaggggccatgcagg

SEQ ID NO: 281596 - DNA, 25 bp, Probe sequence
gtgaggcttctgggtgcataccagt

SEQ ID NO: 281597 - DNA, 25 bp, Probe sequence
gtcatgctgccgcaggatgatcagt

SEQ ID NO: 281598 - DNA, 25 bp, Probe sequence
gtcattgccaatgatatggcagctt

SEQ ID NO: 281599 - DNA, 25 bp, Probe sequence
gggccatgcaggagcttgaagcact

SEQ ID NO: 281600 - DNA, 25 bp, Probe sequence
ggggccatgcaggagcttgaagcac

SEQ ID NO: 281601 - DNA, 25 bp, Probe sequence
ggggtcattgccaatgatatggcag

SEQ ID NO: 281602 - DNA, 25 bp, Probe sequence
ggtgcataccagtcttaccaattat

SEQ ID NO: 281603 - DNA, 25 bp, Probe sequence
tgaatatcggggtcattgccaatga

SEQ ID NO: 281604 - DNA, 25 bp, Probe sequence
tgcaaagtgaggcttctgggtgcat

SEQ ID NO: 281605 - DNA, 25 bp, Probe sequence
tgcataccagtcttaccaattataa

SEQ ID NO: 281606 - DNA, 25 bp, Probe sequence
tcctgtctcccgatgaaaacatatc

SEQ ID NO: 281607 - DNA, 25 bp, Probe sequence
tccggggcgctgcatagagtgctgt

SEQ ID NO: 281608 - DNA, 25 bp, Probe sequence
tctcccgatgaaaacatatcttttg

SEQ ID NO: 281609 - DNA, 25 bp, Probe sequence
tctgcattttcttggagaaatttaa

SEQ ID NO: 281610 - DNA, 25 bp, Probe sequence
tcaaaattgagctctaggcccaaaa

SEQ ID NO: 281611 - DNA, 25 bp, Probe sequence
tatggcagcttctacatacgaatta

SEQ ID NO: 281612 - DNA, 25 bp, Probe sequence
attttatcttgtccgtgaagatgta

SEQ ID NO: 281613 - DNA, 25 bp, Probe sequence
atacagggatgctgtttttccattc

SEQ ID NO: 281614 - DNA, 25 bp, Probe sequence
atctcagcttcttcaggcggtagct

SEQ ID NO: 281615 - DNA, 25 bp, Probe sequence
aggtgcgttatctcagcttcttcag

SEQ ID NO: 281616 - DNA, 25 bp, Probe sequence
agtagcagatgccgttcaaaaggtc

SEQ ID NO: 281617 - DNA, 25 bp, Probe sequence
agattcagtagcagatgccgttcaa

SEQ ID NO: 281618 - DNA, 25 bp, Probe sequence
agaccattccgcttcaaggcagagc

SEQ ID NO: 281619 - DNA, 25 bp, Probe sequence
agcaaatgtgacactgtctatcagt

SEQ ID NO: 281620 - DNA, 25 bp, Probe sequence
agcagattcagtagcagatgccgtt

SEQ ID NO: 281621 - DNA, 25 bp, Probe sequence
agctgattctggaagcaacgttctt

SEQ ID NO: 281622 - DNA, 25 bp, Probe sequence
actgtctatcagtacgtcggcaatg

SEQ ID NO: 281623 - DNA, 25 bp, Probe sequence
aaatgtgacactgtctatcagtacg

SEQ ID NO: 281624 - DNA, 25 bp, Probe sequence
cagcttcttcaggcggtagctgatt

SEQ ID NO: 281625 - DNA, 25 bp, Probe sequence
cagtacgtcggcaatggaagaagac

SEQ ID NO: 281626 - DNA, 25 bp, Probe sequence
caggtgcgttatctcagcttcttca

SEQ ID NO: 281627 - DNA, 25 bp, Probe sequence
cttgtccgtgaagatgtattgcccg

SEQ ID NO: 281628 - DNA, 25 bp, Probe sequence
cattccgcttcaaggcagagcaaat

SEQ ID NO: 281629 - DNA, 25 bp, Probe sequence
cattcatacattaatgaataagctc

SEQ ID NO: 281630 - DNA, 25 bp, Probe sequence
ccagaccattccgcttcaaggcaga

SEQ ID NO: 281631 - DNA, 25 bp, Probe sequence
gcttcttcaggcggtagctgattct

SEQ ID NO: 281632 - DNA, 25 bp, Probe sequence
gcaaatgtgacactgtctatcagta

SEQ ID NO: 281633 - DNA, 25 bp, Probe sequence
gacactgtctatcagtacgtcggca

SEQ ID NO: 281634 - DNA, 25 bp, Probe sequence
gacattttatcttgtccgtgaagat

SEQ ID NO: 281635 - DNA, 25 bp, Probe sequence
gaccattccgcttcaaggcagagca

SEQ ID NO: 281636 - DNA, 25 bp, Probe sequence
gagacattttatcttgtccgtgaag

SEQ ID NO: 281637 - DNA, 25 bp, Probe sequence
gttctttccattcaccagaccattc

SEQ ID NO: 281638 - DNA, 25 bp, Probe sequence
gtagcagatgccgttcaaaaggtcg

SEQ ID NO: 281639 - DNA, 25 bp, Probe sequence
gtagctgattctggaagcaacgttc

SEQ ID NO: 281640 - DNA, 25 bp, Probe sequence
gtcaggtgcgttatctcagcttctt

SEQ ID NO: 281641 - DNA, 25 bp, Probe sequence
gtctatcagtacgtcggcaatggaa

SEQ ID NO: 281642 - DNA, 25 bp, Probe sequence
ggtagctgattctggaagcaacgtt

SEQ ID NO: 281643 - DNA, 25 bp, Probe sequence
ggatgctgtttttccattctacacc

SEQ ID NO: 281644 - DNA, 25 bp, Probe sequence
ggcggtagctgattctggaagcaac

SEQ ID NO: 281645 - DNA, 25 bp, Probe sequence
tggaagcaacgttctttccattcac

SEQ ID NO: 281646 - DNA, 25 bp, Probe sequence
tgtattgcccgatgcaatgagaaaa

SEQ ID NO: 281647 - DNA, 25 bp, Probe sequence
tgattctggaagcaacgttctttcc

SEQ ID NO: 281648 - DNA, 25 bp, Probe sequence
tgaagatgtattgcccgatgcaatg

SEQ ID NO: 281649 - DNA, 25 bp, Probe sequence
tgcgttatctcagcttcttcaggcg

SEQ ID NO: 281650 - DNA, 25 bp, Probe sequence
tgctgtttttccattctacaccatg

SEQ ID NO: 281651 - DNA, 25 bp, Probe sequence
tgcccgatgcaatgagaaaaacatt

SEQ ID NO: 281652 - DNA, 25 bp, Probe sequence
tccattctacaccatggtaaaagaa

SEQ ID NO: 281653 - DNA, 25 bp, Probe sequence
tccgcttcaaggcagagcaaatgtg

SEQ ID NO: 281654 - DNA, 25 bp, Probe sequence
tcttcaggcggtagctgattctgga

SEQ ID NO: 281655 - DNA, 25 bp, Probe sequence
tctatcagtacgtcggcaatggaag

SEQ ID NO: 281656 - DNA, 25 bp, Probe sequence
tcagcttcttcaggcggtagctgat

SEQ ID NO: 281657 - DNA, 25 bp, Probe sequence
tcaccagaccattccgcttcaaggc

SEQ ID NO: 281658 - DNA, 25 bp, Probe sequence
taggtcaggtgcgttatctcagctt

SEQ ID NO: 281659 - DNA, 25 bp, Probe sequence
tatcagtacgtcggcaatggaagaa

SEQ ID NO: 281660 - DNA, 25 bp, Probe sequence
tttcatttggaggataggtcaggtg

SEQ ID NO: 281661 - DNA, 25 bp, Probe sequence
ttcagtagcagatgccgttcaaaag

SEQ ID NO: 281662 - DNA, 25 bp, Probe sequence
attgcgcaatgccataaatttcttc

SEQ ID NO: 281663 - DNA, 25 bp, Probe sequence
atttactcacattcacacgcgattg

SEQ ID NO: 281664 - DNA, 25 bp, Probe sequence
atattaggttcaggtgcataaggga

SEQ ID NO: 281665 - DNA, 25 bp, Probe sequence
atagatgcagccgttgcaggcgaag

SEQ ID NO: 281666 - DNA, 25 bp, Probe sequence
atgacgttgccgattcaccagcact

SEQ ID NO: 281667 - DNA, 25 bp, Probe sequence
accgcaccattccggagtgtataga

SEQ ID NO: 281668 - DNA, 25 bp, Probe sequence
acatttacacatctagcagtcagtt

SEQ ID NO: 281669 - DNA, 25 bp, Probe sequence
acacatctagcagtcagttcttgtt

SEQ ID NO: 281670 - DNA, 25 bp, Probe sequence
aatgctttagaaggatctgttaatc

SEQ ID NO: 281671 - DNA, 25 bp, Probe sequence
cagcctttgccaatcgtgggtgaaa

SEQ ID NO: 281672 - DNA, 25 bp, Probe sequence
catgttgcttaccgcaccattccgg

SEQ ID NO: 281673 - DNA, 25 bp, Probe sequence
cagcagctacatttacacatctagc

SEQ ID NO: 281674 - DNA, 25 bp, Probe sequence
catccctcaagagagaatgcatgga

SEQ ID NO: 281675 - DNA, 25 bp, Probe sequence
catgaacagcctttgccaatcgtgg

SEQ ID NO: 281676 - DNA, 25 bp, Probe sequence
catctagcagtcagttcttgttttc

SEQ ID NO: 281677 - DNA, 25 bp, Probe sequence
cattcacacgcgattgcgcaatgcc

SEQ ID NO: 281678 - DNA, 25 bp, Probe sequence
cataaatttcttcatcgacattttc

SEQ ID NO: 281679 - DNA, 25 bp, Probe sequence
ctagcagtcagttcttgttttcaaa

SEQ ID NO: 281680 - DNA, 25 bp, Probe sequence
cggttatttaggtccagcagctaca

SEQ ID NO: 281681 - DNA, 25 bp, Probe sequence
gccgaacatgttgcttaccgcacca

SEQ ID NO: 281682 - DNA, 25 bp, Probe sequence
cgccgaacatgttgcttaccgcacc

SEQ ID NO: 281683 - DNA, 25 bp, Probe sequence
gcttaccgcaccattccggagtgta

SEQ ID NO: 281684 - DNA, 25 bp, Probe sequence
cgcgattgcgcaatgccataaattt

SEQ ID NO: 281685 - DNA, 25 bp, Probe sequence
ccctcaagagagaatgcatggaaag

SEQ ID NO: 281686 - DNA, 25 bp, Probe sequence
gcgcaatgccataaatttcttcatc

SEQ ID NO: 281687 - DNA, 25 bp, Probe sequence
gcgattgcgcaatgccataaatttc

SEQ ID NO: 281688 - DNA, 25 bp, Probe sequence
gctacatttacacatctagcagtca

SEQ ID NO: 281689 - DNA, 25 bp, Probe sequence
gcagccgttgcaggcgaagttgatt

SEQ ID NO: 281690 - DNA, 25 bp, Probe sequence
gaacatgttgcttaccgcaccattc

SEQ ID NO: 281691 - DNA, 25 bp, Probe sequence
gaacagcctttgccaatcgtgggtg

SEQ ID NO: 281692 - DNA, 25 bp, Probe sequence
gaaatgacgttgccgattcaccagc

SEQ ID NO: 281693 - DNA, 25 bp, Probe sequence
gacattttccttccgttccatatga

SEQ ID NO: 281694 - DNA, 25 bp, Probe sequence
gatgcagccgttgcaggcgaagttg

SEQ ID NO: 281695 - DNA, 25 bp, Probe sequence
gattcaccagcacttgctcgtccat

SEQ ID NO: 281696 - DNA, 25 bp, Probe sequence
gtcggttatttaggtccagcagcta

SEQ ID NO: 281697 - DNA, 25 bp, Probe sequence
ggtccagcagctacatttacacatc

SEQ ID NO: 281698 - DNA, 25 bp, Probe sequence
tgtatagatgcagccgttgcaggcg

SEQ ID NO: 281699 - DNA, 25 bp, Probe sequence
tgaaatgacgttgccgattcaccag

SEQ ID NO: 281700 - DNA, 25 bp, Probe sequence
tgaacagcctttgccaatcgtgggt

SEQ ID NO: 281701 - DNA, 25 bp, Probe sequence
tgccataaatttcttcatcgacatt

SEQ ID NO: 281702 - DNA, 25 bp, Probe sequence
tctgttaatctaacaatagactatt

SEQ ID NO: 281703 - DNA, 25 bp, Probe sequence
tcacattcacacgcgattgcgcaat

SEQ ID NO: 281704 - DNA, 25 bp, Probe sequence
tcacacgcgattgcgcaatgccata

SEQ ID NO: 281705 - DNA, 25 bp, Probe sequence
tacacatctagcagtcagttcttgt

SEQ ID NO: 281706 - DNA, 25 bp, Probe sequence
tactcacattcacacgcgattgcgc

SEQ ID NO: 281707 - DNA, 25 bp, Probe sequence
tatttaggtccagcagctacattta

SEQ ID NO: 281708 - DNA, 25 bp, Probe sequence
ttaggtccagcagctacatttacac

SEQ ID NO: 281709 - DNA, 25 bp, Probe sequence
ttaatacatgaacagcctttgccaa

SEQ ID NO: 281710 - DNA, 25 bp, Probe sequence
ttgccgattcaccagcacttgctcg

SEQ ID NO: 281711 - DNA, 25 bp, Probe sequence
ttgctcgtccatccctcaagagaga

SEQ ID NO: 281712 - DNA, 25 bp, Probe sequence
atgctggcgcttctctcgtcggcgg

SEQ ID NO: 281713 - DNA, 25 bp, Probe sequence
atatcctcattgctgcgatcatgtc

SEQ ID NO: 281714 - DNA, 25 bp, Probe sequence
atcagccgtaccgggcgatgcttgt

SEQ ID NO: 281715 - DNA, 25 bp, Probe sequence
atgctgacattgacgtagtcgttgt

SEQ ID NO: 281716 - DNA, 25 bp, Probe sequence
atgacgagacccaaatgatccgcgt

SEQ ID NO: 281717 - DNA, 25 bp, Probe sequence
atgaattatgcggcttaaagctgtc

SEQ ID NO: 281718 - DNA, 25 bp, Probe sequence
aggatatgttccatcagccgtaccg

SEQ ID NO: 281719 - DNA, 25 bp, Probe sequence
atgtccaaggattggccgcttgtcg

SEQ ID NO: 281720 - DNA, 25 bp, Probe sequence
agggcgcatatggaacggctctcag

SEQ ID NO: 281721 - DNA, 25 bp, Probe sequence
agtttccatatgccgatgccgtaaa

SEQ ID NO: 281722 - DNA, 25 bp, Probe sequence
agctcgcgcttcatttccctcattg

SEQ ID NO: 281723 - DNA, 25 bp, Probe sequence
acgtcgccgagatgaagggcgcata

SEQ ID NO: 281724 - DNA, 25 bp, Probe sequence
acattgacgtagtcgttgtcattcc

SEQ ID NO: 281725 - DNA, 25 bp, Probe sequence
aaatgatccgcgtcccgaatgctga

SEQ ID NO: 281726 - DNA, 25 bp, Probe sequence
aaagcaagtgctgtcagcaatatcc

SEQ ID NO: 281727 - DNA, 25 bp, Probe sequence
aagcaagtgctgtcagcaatatcct

SEQ ID NO: 281728 - DNA, 25 bp, Probe sequence
aattatgcggcttaaagctgtctga

SEQ ID NO: 281729 - DNA, 25 bp, Probe sequence
caagagacgcgagagacgtgcttcc

SEQ ID NO: 281730 - DNA, 25 bp, Probe sequence
cggcctgcatgaggatgacgagacc

SEQ ID NO: 281731 - DNA, 25 bp, Probe sequence
ctttttatgaagtgctgacaagaga

SEQ ID NO: 281732 - DNA, 25 bp, Probe sequence
cgtaccgggcgatgcttgtgcctga

SEQ ID NO: 281733 - DNA, 25 bp, Probe sequence
ctgcgatcatgtccaaggattggcc

SEQ ID NO: 281734 - DNA, 25 bp, Probe sequence
cggacaatgctggcgcttctctcgt

SEQ ID NO: 281735 - DNA, 25 bp, Probe sequence
cggacaagctgcatttagcgagtct

SEQ ID NO: 281736 - DNA, 25 bp, Probe sequence
cggctctcagcggagcaggcccaac

SEQ ID NO: 281737 - DNA, 25 bp, Probe sequence
cgcttcatttccctcattgtgaagt

SEQ ID NO: 281738 - DNA, 25 bp, Probe sequence
ccgggcgatgcttgtgcctgagctg

SEQ ID NO: 281739 - DNA, 25 bp, Probe sequence
ccaacgattctcgtcatgaccgaaa

SEQ ID NO: 281740 - DNA, 25 bp, Probe sequence
gcccaacgattctcgtcatgaccga

SEQ ID NO: 281741 - DNA, 25 bp, Probe sequence
gcgcttctctcgtcggcggacttgt

SEQ ID NO: 281742 - DNA, 25 bp, Probe sequence
tgcttccgaaggagtttccatatgc

SEQ ID NO: 281743 - DNA, 25 bp, Probe sequence
gagacgcgagagacgtgcttccgaa

SEQ ID NO: 281744 - DNA, 25 bp, Probe sequence
gacacccggacaatgctggcgcttc

SEQ ID NO: 281745 - DNA, 25 bp, Probe sequence
gacttgtgatcggcctgcatgagga

SEQ ID NO: 281746 - DNA, 25 bp, Probe sequence
gagcaggcccaacgattctcgtcat

SEQ ID NO: 281747 - DNA, 25 bp, Probe sequence
gagcgaaatcctttatatcaagtaa

SEQ ID NO: 281748 - DNA, 25 bp, Probe sequence
tgatcggcctgcatgaggatgacga

SEQ ID NO: 281749 - DNA, 25 bp, Probe sequence
gtgctgtcagcaatatcctcattgc

SEQ ID NO: 281750 - DNA, 25 bp, Probe sequence
tgaagggcgcatatggaacggctct

SEQ ID NO: 281751 - DNA, 25 bp, Probe sequence
tgttccatcagccgtaccgggcgat

SEQ ID NO: 281752 - DNA, 25 bp, Probe sequence
tcagcggagcaggcccaacgattct

SEQ ID NO: 281753 - DNA, 25 bp, Probe sequence
tgctggcgcttctctcgtcggcgga

SEQ ID NO: 281754 - DNA, 25 bp, Probe sequence
tgcttgtgcctgagctgtcaaaagt

SEQ ID NO: 281755 - DNA, 25 bp, Probe sequence
tgctgacattgacgtagtcgttgtc

SEQ ID NO: 281756 - DNA, 25 bp, Probe sequence
tgcatttagcgagtctagaagaagg

SEQ ID NO: 281757 - DNA, 25 bp, Probe sequence
tcggcggacttgtgatcggcctgca

SEQ ID NO: 281758 - DNA, 25 bp, Probe sequence
tccgcgtcccgaatgctgacattga

SEQ ID NO: 281759 - DNA, 25 bp, Probe sequence
tcattgctgcgatcatgtccaagga

SEQ ID NO: 281760 - DNA, 25 bp, Probe sequence
tcatgtccaaggattggccgcttgt

SEQ ID NO: 281761 - DNA, 25 bp, Probe sequence
taaagctgtctgaagcggacaagct

SEQ ID NO: 281762 - DNA, 25 bp, Probe sequence
attcacctgccgaagctgtctgagc

SEQ ID NO: 281763 - DNA, 25 bp, Probe sequence
atcaccgattgcccttgtcaactca

SEQ ID NO: 281764 - DNA, 25 bp, Probe sequence
aggtaacacttccgctgctgcggca

SEQ ID NO: 281765 - DNA, 25 bp, Probe sequence
agatcgcggaatggttatggctgtg

SEQ ID NO: 281766 - DNA, 25 bp, Probe sequence
aactcgctcaagctgtcatgtacgg

SEQ ID NO: 281767 - DNA, 25 bp, Probe sequence
agctcggaattgagcttcatgtcaa

SEQ ID NO: 281768 - DNA, 25 bp, Probe sequence
agctgtcatgtacggagccgagatt

SEQ ID NO: 281769 - DNA, 25 bp, Probe sequence
acctcttattcacctgccgaagctg

SEQ ID NO: 281770 - DNA, 25 bp, Probe sequence
aaatgctggaaacatcactgcgtac

SEQ ID NO: 281771 - DNA, 25 bp, Probe sequence
aacacttccgctgctgcggcagcat

SEQ ID NO: 281772 - DNA, 25 bp, Probe sequence
aaactgctgccttcgaagtgtgcga

SEQ ID NO: 281773 - DNA, 25 bp, Probe sequence
aactgctgccttcgaagtgtgcgaa

SEQ ID NO: 281774 - DNA, 25 bp, Probe sequence
aatgcattgtcatcatcccgaacgg

SEQ ID NO: 281775 - DNA, 25 bp, Probe sequence
cacaggccttccgaaaatgcgcggc

SEQ ID NO: 281776 - DNA, 25 bp, Probe sequence
cacttccgctgctgcggcagcatat

SEQ ID NO: 281777 - DNA, 25 bp, Probe sequence
cagcatatgcagcccgtgctaacat

SEQ ID NO: 281778 - DNA, 25 bp, Probe sequence
cactgcgtactggaagggcttcaag

SEQ ID NO: 281779 - DNA, 25 bp, Probe sequence
catgtacggagccgagattatcgca

SEQ ID NO: 281780 - DNA, 25 bp, Probe sequence
catgaaggaaacacacctcttattc

SEQ ID NO: 281781 - DNA, 25 bp, Probe sequence
catcactgcgtactggaagggcttc

SEQ ID NO: 281782 - DNA, 25 bp, Probe sequence
cgctgctgcggcagcatatgcagcc

SEQ ID NO: 281783 - DNA, 25 bp, Probe sequence
cctgccgaagctgtctgagcagctc

SEQ ID NO: 281784 - DNA, 25 bp, Probe sequence
cgctcaagctgtcatgtacggagcc

SEQ ID NO: 281785 - DNA, 25 bp, Probe sequence
ccgttccatctgtgagaaatcaccg

SEQ ID NO: 281786 - DNA, 25 bp, Probe sequence
gcgtcaatcctacgggatcatttaa

SEQ ID NO: 281787 - DNA, 25 bp, Probe sequence
gaagctgtctgagcagctcggaatt

SEQ ID NO: 281788 - DNA, 25 bp, Probe sequence
ggaaggcgtcaatcctacgggatca

SEQ ID NO: 281789 - DNA, 25 bp, Probe sequence
gaaacaatagcgacagccattcgta

SEQ ID NO: 281790 - DNA, 25 bp, Probe sequence
gaaatcaccgattgcccttgtcaac

SEQ ID NO: 281791 - DNA, 25 bp, Probe sequence
gaaatgcattgtcatcatcccgaac

SEQ ID NO: 281792 - DNA, 25 bp, Probe sequence
gattgcccttgtcaactcagtcaac

SEQ ID NO: 281793 - DNA, 25 bp, Probe sequence
gtacggagccgagattatcgcaatt

SEQ ID NO: 281794 - DNA, 25 bp, Probe sequence
gtctgagcagctcggaattgagctt

SEQ ID NO: 281795 - DNA, 25 bp, Probe sequence
gtgcgcgtcaacaggtaacacttcc

SEQ ID NO: 281796 - DNA, 25 bp, Probe sequence
ggcggcaatcgtgcgcaatgaagtg

SEQ ID NO: 281797 - DNA, 25 bp, Probe sequence
ggttatggctgtggcaaaggcaaaa

SEQ ID NO: 281798 - DNA, 25 bp, Probe sequence
ggaaaggacttatccatcaatataa

SEQ ID NO: 281799 - DNA, 25 bp, Probe sequence
tgatgttttagcgatcccggtcgga

SEQ ID NO: 281800 - DNA, 25 bp, Probe sequence
tgagcttcatgtcaaaacggaaggc

SEQ ID NO: 281801 - DNA, 25 bp, Probe sequence
tgagaaatcaccgattgcccttgtc

SEQ ID NO: 281802 - DNA, 25 bp, Probe sequence
tgacacgattatgtgcgcgtcaaca

SEQ ID NO: 281803 - DNA, 25 bp, Probe sequence
tgcagcccgtgctaacatgaaatgc

SEQ ID NO: 281804 - DNA, 25 bp, Probe sequence
tgcggcggcaatcgtgcgcaatgaa

SEQ ID NO: 281805 - DNA, 25 bp, Probe sequence
tgcggcagcatatgcagcccgtgct

SEQ ID NO: 281806 - DNA, 25 bp, Probe sequence
tcatgtcaaaacggaaggcgtcaat

SEQ ID NO: 281807 - DNA, 25 bp, Probe sequence
tatgtgcgcgtcaacaggtaacact

SEQ ID NO: 281808 - DNA, 25 bp, Probe sequence
tatcgcaattgacggaaactttgac

SEQ ID NO: 281809 - DNA, 25 bp, Probe sequence
ttatggctgtggcaaaggcaaaaga

SEQ ID NO: 281810 - DNA, 25 bp, Probe sequence
ttagcgatcccggtcggaaatgctg

SEQ ID NO: 281811 - DNA, 25 bp, Probe sequence
ttaaaattgtccgttccatctgtga

SEQ ID NO: 281812 - DNA, 25 bp, Probe sequence
attcagtcggaatggcgctcagcag

SEQ ID NO: 281813 - DNA, 25 bp, Probe sequence
ataacctgatctaccaagtggctaa

SEQ ID NO: 281814 - DNA, 25 bp, Probe sequence
aggtgtggagcgacatcccgcttgc

SEQ ID NO: 281815 - DNA, 25 bp, Probe sequence
acgaagccgacatgctgttctctgt

SEQ ID NO: 281816 - DNA, 25 bp, Probe sequence
actgaaagatccgaacacagcggtc

SEQ ID NO: 281817 - DNA, 25 bp, Probe sequence
acattgccgactgatgaagacagca

SEQ ID NO: 281818 - DNA, 25 bp, Probe sequence
aacacagcggtcgacatttcagaaa

SEQ ID NO: 281819 - DNA, 25 bp, Probe sequence
aagctgaccgtctttgaaagcgaca

SEQ ID NO: 281820 - DNA, 25 bp, Probe sequence
cacattgccgactgatgaagacagc

SEQ ID NO: 281821 - DNA, 25 bp, Probe sequence
cagtcgccggaattcgcggtacaga

SEQ ID NO: 281822 - DNA, 25 bp, Probe sequence
catttcagaaatcaagcctgtcaca

SEQ ID NO: 281823 - DNA, 25 bp, Probe sequence
ctcctgtccatgtgaaggtgtggag

SEQ ID NO: 281824 - DNA, 25 bp, Probe sequence
ctgtaaaggcagccgaggaatccaa

SEQ ID NO: 281825 - DNA, 25 bp, Probe sequence
ctgtccatgtgaaggtgtggagcga

SEQ ID NO: 281826 - DNA, 25 bp, Probe sequence
cgtctatcgcaggagtgctgaaaca

SEQ ID NO: 281827 - DNA, 25 bp, Probe sequence
cgcttgcacgcggccttggcagcag

SEQ ID NO: 281828 - DNA, 25 bp, Probe sequence
ccgacatgctgttctctgtcactgt

SEQ ID NO: 281829 - DNA, 25 bp, Probe sequence
cccgtgtatgaacgaagccgacatg

SEQ ID NO: 281830 - DNA, 25 bp, Probe sequence
cctgtcacattgccgactgatgaag

SEQ ID NO: 281831 - DNA, 25 bp, Probe sequence
gcccgtgtagaaggcgtgtttgcag

SEQ ID NO: 281832 - DNA, 25 bp, Probe sequence
gcttgcacgcggccttggcagcagc

SEQ ID NO: 281833 - DNA, 25 bp, Probe sequence
gcggtcgacatttcagaaatcaagc

SEQ ID NO: 281834 - DNA, 25 bp, Probe sequence
gaaccaggttcttgcgcgtctatcg

SEQ ID NO: 281835 - DNA, 25 bp, Probe sequence
gacagcatccttgaatatgtaaaag

SEQ ID NO: 281836 - DNA, 25 bp, Probe sequence
gatgaaatccttcacgcatatcagc

SEQ ID NO: 281837 - DNA, 25 bp, Probe sequence
gatgaagacagcatccttgaatatg

SEQ ID NO: 281838 - DNA, 25 bp, Probe sequence
gatccgaacacagcggtcgacattt

SEQ ID NO: 281839 - DNA, 25 bp, Probe sequence
tgaagctgaccgtctttgaaagcga

SEQ ID NO: 281840 - DNA, 25 bp, Probe sequence
gatatttgaagctgaccgtctttga

SEQ ID NO: 281841 - DNA, 25 bp, Probe sequence
gttctctgtcactgttcccggaagc

SEQ ID NO: 281842 - DNA, 25 bp, Probe sequence
gtatgaacgaagccgacatgctgtt

SEQ ID NO: 281843 - DNA, 25 bp, Probe sequence
gtacagataacctgatctaccaagt

SEQ ID NO: 281844 - DNA, 25 bp, Probe sequence
ggagcggcccgtgtatgaacgaagc

SEQ ID NO: 281845 - DNA, 25 bp, Probe sequence
ggttcttgcgcgtctatcgcaggag

SEQ ID NO: 281846 - DNA, 25 bp, Probe sequence
ggcagcaaggtcgtagctgtgttaa

SEQ ID NO: 281847 - DNA, 25 bp, Probe sequence
tggcgctcagcagatatttgaagct

SEQ ID NO: 281848 - DNA, 25 bp, Probe sequence
tgatctaccaagtggctaaacggac

SEQ ID NO: 281849 - DNA, 25 bp, Probe sequence
tgaccgtctttgaaagcgacaaatg

SEQ ID NO: 281850 - DNA, 25 bp, Probe sequence
tgctgttctctgtcactgttcccgg

SEQ ID NO: 281851 - DNA, 25 bp, Probe sequence
tgcgcgtctatcgcaggagtgctga

SEQ ID NO: 281852 - DNA, 25 bp, Probe sequence
tctatcgcaggagtgctgaaacagg

SEQ ID NO: 281853 - DNA, 25 bp, Probe sequence
tctctgtcactgttcccggaagcac

SEQ ID NO: 281854 - DNA, 25 bp, Probe sequence
tcggaatggcgctcagcagatattt

SEQ ID NO: 281855 - DNA, 25 bp, Probe sequence
tcagctgatcgcccgtgtagaaggc

SEQ ID NO: 281856 - DNA, 25 bp, Probe sequence
tcactgttcccggaagcacagctaa

SEQ ID NO: 281857 - DNA, 25 bp, Probe sequence
tcagaaatcaagcctgtcacattgc

SEQ ID NO: 281858 - DNA, 25 bp, Probe sequence
tatcagctgatcgcccgtgtagaag

SEQ ID NO: 281859 - DNA, 25 bp, Probe sequence
tttgcagaaccaggttcttgcgcgt

SEQ ID NO: 281860 - DNA, 25 bp, Probe sequence
ttcagtcggaatggcgctcagcaga

SEQ ID NO: 281861 - DNA, 25 bp, Probe sequence
ttcgcggtacagataacctgatcta

SEQ ID NO: 281862 - DNA, 25 bp, Probe sequence
attcagcttcacggtgatgaaaaac

SEQ ID NO: 281863 - DNA, 25 bp, Probe sequence
atttgcagcttgcggcggaatcaca

SEQ ID NO: 281864 - DNA, 25 bp, Probe sequence
atcagcaggcggctattggtaaacg

SEQ ID NO: 281865 - DNA, 25 bp, Probe sequence
atgctgctgctcttcgcaagctgac

SEQ ID NO: 281866 - DNA, 25 bp, Probe sequence
atgttgacggctttgtgattgattc

SEQ ID NO: 281867 - DNA, 25 bp, Probe sequence
atgtgtgccggaatatcagcaggcg

SEQ ID NO: 281868 - DNA, 25 bp, Probe sequence
agacgatgtcacgtattgccaagag

SEQ ID NO: 281869 - DNA, 25 bp, Probe sequence
agcaggcggctattggtaaacgctg

SEQ ID NO: 281870 - DNA, 25 bp, Probe sequence
agctgacaggctgtgaaatatggaa

SEQ ID NO: 281871 - DNA, 25 bp, Probe sequence
agctcgacgtcattcagcttcacgg

SEQ ID NO: 281872 - DNA, 25 bp, Probe sequence
acgtattgccaagagcttgaagctc

SEQ ID NO: 281873 - DNA, 25 bp, Probe sequence
acgtcattcagcttcacggtgatga

SEQ ID NO: 281874 - DNA, 25 bp, Probe sequence
acttatcggtgaatcattgatgaga

SEQ ID NO: 281875 - DNA, 25 bp, Probe sequence
aaaggatttgcagcttgcggcggaa

SEQ ID NO: 281876 - DNA, 25 bp, Probe sequence
aaccggcggatgctgctgctcttcg

SEQ ID NO: 281877 - DNA, 25 bp, Probe sequence
aagcaatccatgctttgtttaggga

SEQ ID NO: 281878 - DNA, 25 bp, Probe sequence
aatgtgtgccggaatatcagcaggc

SEQ ID NO: 281879 - DNA, 25 bp, Probe sequence
aatccatgctttgtttagggagtga

SEQ ID NO: 281880 - DNA, 25 bp, Probe sequence
aatatcagcaggcggctattggtaa

SEQ ID NO: 281881 - DNA, 25 bp, Probe sequence
caaacttctcagcgtaaagcaatcc

SEQ ID NO: 281882 - DNA, 25 bp, Probe sequence
cacaggctgattacctaggatttat

SEQ ID NO: 281883 - DNA, 25 bp, Probe sequence
cagcaggcggctattggtaaacgct

SEQ ID NO: 281884 - DNA, 25 bp, Probe sequence
cttgaagctcgacgtcattcagctt

SEQ ID NO: 281885 - DNA, 25 bp, Probe sequence
ctgctgctcttcgcaagctgacagg

SEQ ID NO: 281886 - DNA, 25 bp, Probe sequence
ctgctcttcgcaagctgacaggctg

SEQ ID NO: 281887 - DNA, 25 bp, Probe sequence
cggcggatgctgctgctcttcgcaa

SEQ ID NO: 281888 - DNA, 25 bp, Probe sequence
cgcaagctgacaggctgtgaaatat

SEQ ID NO: 281889 - DNA, 25 bp, Probe sequence
cgatgtcacgtattgccaagagctt

SEQ ID NO: 281890 - DNA, 25 bp, Probe sequence
gcgcttcaccatcaagataacacaa

SEQ ID NO: 281891 - DNA, 25 bp, Probe sequence
gcgagctgtacttatcggtgaatca

SEQ ID NO: 281892 - DNA, 25 bp, Probe sequence
gatgctgctgctcttcgcaagctga

SEQ ID NO: 281893 - DNA, 25 bp, Probe sequence
gcaagctgacaggctgtgaaatatg

SEQ ID NO: 281894 - DNA, 25 bp, Probe sequence
gtattgccaagagcttgaagctcga

SEQ ID NO: 281895 - DNA, 25 bp, Probe sequence
gtgttgcattttcttgggaatgtgt

SEQ ID NO: 281896 - DNA, 25 bp, Probe sequence
gtgtgccggaatatcagcaggcggc

SEQ ID NO: 281897 - DNA, 25 bp, Probe sequence
ggaaggcgcttcaccatcaagataa

SEQ ID NO: 281898 - DNA, 25 bp, Probe sequence
tggctgaaccaagttcgtgtcgaaa

SEQ ID NO: 281899 - DNA, 25 bp, Probe sequence
tgtcacgtattgccaagagcttgaa

SEQ ID NO: 281900 - DNA, 25 bp, Probe sequence
tgtacttatcggtgaatcattgatg

SEQ ID NO: 281901 - DNA, 25 bp, Probe sequence
tgattgattcatctgtaaaagggtc

SEQ ID NO: 281902 - DNA, 25 bp, Probe sequence
tgattcatctgtaaaagggtctaga

SEQ ID NO: 281903 - DNA, 25 bp, Probe sequence
tgccggaatatcagcaggcggctat

SEQ ID NO: 281904 - DNA, 25 bp, Probe sequence
tgcggcggaatcacaggctgattac

SEQ ID NO: 281905 - DNA, 25 bp, Probe sequence
taatgttgacggctttgtgattgat

SEQ ID NO: 281906 - DNA, 25 bp, Probe sequence
tatggaaggcgcttcaccatcaaga

SEQ ID NO: 281907 - DNA, 25 bp, Probe sequence
ttgccaagagcttgaagctcgacgt

SEQ ID NO: 281908 - DNA, 25 bp, Probe sequence
tttcttgggaatgtgtgccggaata

SEQ ID NO: 281909 - DNA, 25 bp, Probe sequence
ttaacatttgtcaatgaacatgggg

SEQ ID NO: 281910 - DNA, 25 bp, Probe sequence
ttcagcttcacggtgatgaaaaacc

SEQ ID NO: 281911 - DNA, 25 bp, Probe sequence
ttgcggcggaatcacaggctgatta

SEQ ID NO: 281912 - DNA, 25 bp, Probe sequence
atatctcaacggcctcggcaattgt

SEQ ID NO: 281913 - DNA, 25 bp, Probe sequence
agtcgatggacttcctgatattgtt

SEQ ID NO: 281914 - DNA, 25 bp, Probe sequence
agaacggtgttgcatcgatacaggc

SEQ ID NO: 281915 - DNA, 25 bp, Probe sequence
agcggaaatgactccttctgaaatg

SEQ ID NO: 281916 - DNA, 25 bp, Probe sequence
acgattcgcacgatgagtgtaaaga

SEQ ID NO: 281917 - DNA, 25 bp, Probe sequence
acacgctcttacagtcgatggactt

SEQ ID NO: 281918 - DNA, 25 bp, Probe sequence
acttcctgatattgttgatacatgc

SEQ ID NO: 281919 - DNA, 25 bp, Probe sequence
aacggtgttgcatcgatacaggcag

SEQ ID NO: 281920 - DNA, 25 bp, Probe sequence
aatatcgactcttgtattacgattc

SEQ ID NO: 281921 - DNA, 25 bp, Probe sequence
aattgttgcctcggcagctggtgcg

SEQ ID NO: 281922 - DNA, 25 bp, Probe sequence
caatgcgggcacacgctcttacagt

SEQ ID NO: 281923 - DNA, 25 bp, Probe sequence
caatcgctctgtctcttctaaaagc

SEQ ID NO: 281924 - DNA, 25 bp, Probe sequence
cagctggtgcgaaaatcgctaagca

SEQ ID NO: 281925 - DNA, 25 bp, Probe sequence
cttactgccggtgaggctgaaacgc

SEQ ID NO: 281926 - DNA, 25 bp, Probe sequence
gcgggcacacgctcttacagtcgat

SEQ ID NO: 281927 - DNA, 25 bp, Probe sequence
cagatttctacaattgtgcgttgac

SEQ ID NO: 281928 - DNA, 25 bp, Probe sequence
caggcaggtgctggcattgttgctg

SEQ ID NO: 281929 - DNA, 25 bp, Probe sequence
catggcaatcgctctgtctcttcta

SEQ ID NO: 281930 - DNA, 25 bp, Probe sequence
ctcggcaattgttgcctcggcagct

SEQ ID NO: 281931 - DNA, 25 bp, Probe sequence
ctctgtctcttctaaaagcggaagc

SEQ ID NO: 281932 - DNA, 25 bp, Probe sequence
ctcttgtattacgattcgcacgatg

SEQ ID NO: 281933 - DNA, 25 bp, Probe sequence
ctcttacagtcgatggacttcctga

SEQ ID NO: 281934 - DNA, 25 bp, Probe sequence
ctggcattgttgctgattctgttcc

SEQ ID NO: 281935 - DNA, 25 bp, Probe sequence
cgatacaggcaggtgctggcattgt

SEQ ID NO: 281936 - DNA, 25 bp, Probe sequence
cgctaagcatggcaatcgctctgtc

SEQ ID NO: 281937 - DNA, 25 bp, Probe sequence
gccggtgcgctgctgaaaacgattc

SEQ ID NO: 281938 - DNA, 25 bp, Probe sequence
tactgccggtgaggctgaaacgctg

SEQ ID NO: 281939 - DNA, 25 bp, Probe sequence
gctgtaataaagccggtgcgctgct

SEQ ID NO: 281940 - DNA, 25 bp, Probe sequence
gcttgcgggttttgtgaaggcaatg

SEQ ID NO: 281941 - DNA, 25 bp, Probe sequence
gcatggcaatcgctctgtctcttct

SEQ ID NO: 281942 - DNA, 25 bp, Probe sequence
gcaattgttgcctcggcagctggtg

SEQ ID NO: 281943 - DNA, 25 bp, Probe sequence
gacatgtttcatagcaaggaggata

SEQ ID NO: 281944 - DNA, 25 bp, Probe sequence
gactcttgtattacgattcgcacga

SEQ ID NO: 281945 - DNA, 25 bp, Probe sequence
gatgatggcagcggaaatgactcct

SEQ ID NO: 281946 - DNA, 25 bp, Probe sequence
gatattgtcaattcttgctcatcgg

SEQ ID NO: 281947 - DNA, 25 bp, Probe sequence
gttgcatcgatacaggcaggtgctg

SEQ ID NO: 281948 - DNA, 25 bp, Probe sequence
gttgctgattctgttccggaagccg

SEQ ID NO: 281949 - DNA, 25 bp, Probe sequence
ggtgtattgcctacattgggtttga

SEQ ID NO: 281950 - DNA, 25 bp, Probe sequence
ggtgctggcattgttgctgattctg

SEQ ID NO: 281951 - DNA, 25 bp, Probe sequence
ggcaatgcgggcacacgctcttaca

SEQ ID NO: 281952 - DNA, 25 bp, Probe sequence
tgcctcggcagctggtgcgaaaatc

SEQ ID NO: 281953 - DNA, 25 bp, Probe sequence
tggacttcctgatattgttgataca

SEQ ID NO: 281954 - DNA, 25 bp, Probe sequence
tgtctcttctaaaagcggaagcgct

SEQ ID NO: 281955 - DNA, 25 bp, Probe sequence
tgtattacgattcgcacgatgagtg

SEQ ID NO: 281956 - DNA, 25 bp, Probe sequence
tgtttcatagcaaggaggataaagc

SEQ ID NO: 281957 - DNA, 25 bp, Probe sequence
tgcgctgctgaaaacgattcatatt

SEQ ID NO: 281958 - DNA, 25 bp, Probe sequence
tcttacagtcgatggacttcctgat

SEQ ID NO: 281959 - DNA, 25 bp, Probe sequence
tctacaattgtgcgttgacggaaaa

SEQ ID NO: 281960 - DNA, 25 bp, Probe sequence
tatgatgatggcagcggaaatgact

SEQ ID NO: 281961 - DNA, 25 bp, Probe sequence
tatctcaacggcctcggcaattgtt

SEQ ID NO: 281962 - DNA, 25 bp, Probe sequence
tttaaggaggcgctggcaagcccga

SEQ ID NO: 281963 - DNA, 25 bp, Probe sequence
atagactatgaggctgcgaaggcag

SEQ ID NO: 281964 - DNA, 25 bp, Probe sequence
attacaagcggaggcgctgccgcgc

SEQ ID NO: 281965 - DNA, 25 bp, Probe sequence
atttacaggtgcagtcaccgaaaga

SEQ ID NO: 281966 - DNA, 25 bp, Probe sequence
aggtgcagtcaccgaaagagagcgc

SEQ ID NO: 281967 - DNA, 25 bp, Probe sequence
agtcaccgaaagagagcgcctatct

SEQ ID NO: 281968 - DNA, 25 bp, Probe sequence
agatttacaggtgcagtcaccgaaa

SEQ ID NO: 281969 - DNA, 25 bp, Probe sequence
agacgattacaagcggaggcgctgc

SEQ ID NO: 281970 - DNA, 25 bp, Probe sequence
agagcagcctttcgagaaacgttca

SEQ ID NO: 281971 - DNA, 25 bp, Probe sequence
acactggttttgccggtagagcagc

SEQ ID NO: 281972 - DNA, 25 bp, Probe sequence
aaagcagcagttccgctttatctat

SEQ ID NO: 281973 - DNA, 25 bp, Probe sequence
cactggttttgccggtagagcagcc

SEQ ID NO: 281974 - DNA, 25 bp, Probe sequence
aagatttacaggtgcagtcaccgaa

SEQ ID NO: 281975 - DNA, 25 bp, Probe sequence
caccgaaagagagcgcctatctcat

SEQ ID NO: 281976 - DNA, 25 bp, Probe sequence
cagatgcgatttccgttttaacaga

SEQ ID NO: 281977 - DNA, 25 bp, Probe sequence
cgattacaagcggaggcgctgccgc

SEQ ID NO: 281978 - DNA, 25 bp, Probe sequence
cgttcatttaaggaggcgctggcaa

SEQ ID NO: 281979 - DNA, 25 bp, Probe sequence
ccgcgcagcttgaacgactaaagca

SEQ ID NO: 281980 - DNA, 25 bp, Probe sequence
gcgctggcaagcccgaatcggttta

SEQ ID NO: 281981 - DNA, 25 bp, Probe sequence
gcgctgccgcgcagcttgaacgact

SEQ ID NO: 281982 - DNA, 25 bp, Probe sequence
gcgcctatctcattcagaatatttt

SEQ ID NO: 281983 - DNA, 25 bp, Probe sequence
gcgcagcttgaacgactaaagcaga

SEQ ID NO: 281984 - DNA, 25 bp, Probe sequence
gcatcgccgtcaaaagggcttatta

SEQ ID NO: 281985 - DNA, 25 bp, Probe sequence
gcagcagttccgctttatctattac

SEQ ID NO: 281986 - DNA, 25 bp, Probe sequence
gaagatttcggtttcacaaatggca

SEQ ID NO: 281987 - DNA, 25 bp, Probe sequence
gactatgaggctgcgaaggcagatg

SEQ ID NO: 281988 - DNA, 25 bp, Probe sequence
gagctgcgatttacacggcgggaat

SEQ ID NO: 281989 - DNA, 25 bp, Probe sequence
gagcgcctatctcattcagaatatt

SEQ ID NO: 281990 - DNA, 25 bp, Probe sequence
gagctggcgttagagacgattacaa

SEQ ID NO: 281991 - DNA, 25 bp, Probe sequence
gaggcgctgccgcgcagcttgaacg

SEQ ID NO: 281992 - DNA, 25 bp, Probe sequence
gatgcgatttccgttttaacagaca

SEQ ID NO: 281993 - DNA, 25 bp, Probe sequence
gattttgtgcctgtgcagattgcaa

SEQ ID NO: 281994 - DNA, 25 bp, Probe sequence
gtttcacaaatggcagacttgaaga

SEQ ID NO: 281995 - DNA, 25 bp, Probe sequence
ggattttgtgcctgtgcagattgca

SEQ ID NO: 281996 - DNA, 25 bp, Probe sequence
ggcgctgccgcgcagcttgaacgac

SEQ ID NO: 281997 - DNA, 25 bp, Probe sequence
tgattgccgaagtgaagaaagcatc

SEQ ID NO: 281998 - DNA, 25 bp, Probe sequence
tgaggctgcgaaggcagatgcgatt

SEQ ID NO: 281999 - DNA, 25 bp, Probe sequence
tgcagtcaccgaaagagagcgccta

SEQ ID NO: 282000 - DNA, 25 bp, Probe sequence
tgcctgtgcagattgcaatagacta

SEQ ID NO: 282001 - DNA, 25 bp, Probe sequence
tcggtttcacaaatggcagacttga

SEQ ID NO: 282002 - DNA, 25 bp, Probe sequence
tcatttaaggaggcgctggcaagcc

SEQ ID NO: 282003 - DNA, 25 bp, Probe sequence
tcaccgaaagagagcgcctatctca

SEQ ID NO: 282004 - DNA, 25 bp, Probe sequence
tacggcttttaatgcgggagctgcg

SEQ ID NO: 282005 - DNA, 25 bp, Probe sequence
tagactatgaggctgcgaaggcaga

SEQ ID NO: 282006 - DNA, 25 bp, Probe sequence
tatcgggttgattgccgaagtgaag

SEQ ID NO: 282007 - DNA, 25 bp, Probe sequence
tttgtgcctgtgcagattgcaatag

SEQ ID NO: 282008 - DNA, 25 bp, Probe sequence
tttaatgcgggagctgcgatttaca

SEQ ID NO: 282009 - DNA, 25 bp, Probe sequence
tttatcgggttgattgccgaagtga

SEQ ID NO: 282010 - DNA, 25 bp, Probe sequence
ttacggcttttaatgcgggagctgc

SEQ ID NO: 282011 - DNA, 25 bp, Probe sequence
ttaatgcgggagctgcgatttacac
